(19) United States
(12) Patent Application Publication
(10) Pub. No.: US 2015/0017168 A1
(43) Pub. Date: Jan. 15, 2015

(54) DUAL VARIABLE DOMAIN IMMUNOGLOBULINS AND USES THEREOF

(71) Applicants: Tariq Ghayur, Holliston, MA (US); Junjian Liu, Shrewbury, MA (US); Gillian A. Kingsbury, Wayland, MA (US); Edward B. Reilly, Libertyville, IL (US); Susan E. Morgan-Lappe, Chicago, IL (US)

(72) Inventors: Tariq Ghayur, Holliston, MA (US); Junjian Liu, Shrewbury, MA (US); Gillian A. Kingsbury, Wayland, MA (US); Edward B. Reilly, Libertyville, IL (US); Susan E. Morgan-Lappe, Chicago, IL (US)

(73) Assignee: ABBVIE INC., North Chicago, IL (US)

(21) Appl. No.: 14/332,087

(22) Filed: Jul. 15, 2014

Related U.S. Application Data
(63) Continuation of application No. 12/771,871, filed on Apr. 30, 2010.
(60) Provisional application No. 61/174,711, filed on May 1, 2009.

(51) Int. Cl. C07K 16/28; A61K 45/06; C07K 16/22; A61K 47/48; A61K 39/395; C07K 16/40

(52) U.S. Cl. CPC C07K 16/2863; A61K 39/3955; C07K 16/40; C07K 16/28; C07K 16/22; A61K 39/39558; A61K 47/48676; A61K 45/06; C07K 2317/31
USPC 424/136.1; 530/387.3; 530/391.3; 530/391.7

(57) ABSTRACT

The present invention relates to engineered multivalent and multispecific binding proteins, methods of making, and specifically to their uses in the prevention, diagnosis, and/or treatment of disease.

### CROSS-REFERENCE TO RELATED APPLICATIONS

[0001] This application claims priority to U.S. Provisional Patent Application No. 61/174,711, filed May 1, 2009, which is hereby expressly incorporated herein by reference in its entirety for any purpose.

### FIELD OF THE INVENTION

[0002] The present invention relates to multivalent and multispecific binding proteins, methods of making, and specifically to their uses in the, diagnosis, prevention and/or treatment of acute and chronic inflammatory diseases, cancer, and other diseases.

### BACKGROUND OF THE INVENTION

[0003] Engineered proteins, such as multispecific antibodies capable of binding two or more antigens are known in the art. Such multispecific binding proteins can be generated using cell fusion, chemical conjugation, or recombinant DNA techniques.

[0004] Bispecific antibodies have been produced using quadroma technology (see Milstein, C. and A. C. Cuello (1983) Nature 305(5934):537-40) based on the somatic fusion of two different hybridoma cell lines expressing murine monoclonal antibodies (mAbs) with the desired specificities of the bispecific antibody. Because of the random pairing of two different immunoglobulin (Ig) heavy and light chains within the resulting hybrid-hybridoma (or quadroma) cell line, up to ten different Ig species are generated, of which only one is the functional bispecific antibody. The presence of mis-paired by-products, and significantly reduced production yields, means sophisticated purification procedures are required.

[0005] Bispecific antibodies can also be produced by chemical conjugation of two different mAbs (see Staerz, U. D., et al. (1985) Nature 314(6012): 628-31). This approach does not yield homogeneous preparation. Other approaches have used chemical conjugation of two different mAbs or smaller antibody fragments (see Brennan, M., et al. (1985) Science 229(4708): 81-3).

[0006] Another method used to produce bispecific antibodies is the coupling of two parental antibodies with a hetero-bifunctional crosslinker, but the resulting bispecific antibodies suffer from significant molecular heterogeneity because reaction of the crosslinker with the parental antibodies is not site-directed. To obtain more homogeneous preparations of bispecific antibodies two different Fab fragments have been chemically crosslinked at their hinge cysteine residues in a site-directed manner (see Glennie, M. J., et al. (1987) J. Immunol. 139(7): 2367-75). But this method results in Fab′2 fragments, not full IgG molecule.

[0007] A wide variety of other recombinant bispecific antibody formats have been developed (see Kriangkum, J., et al. (2001) Biomol. Eng. 18(2): 31-40). Amongst them tandem single-chain Fv molecules and diabodies, and various derivatives thereof, are the most widely used. Routinely, construction of these molecules starts from two single-chain Fv (scFv) fragments that recognize different antigens (see Economides, A. N., et al. (2003) Nat. Med. 9(1): 47-52). Tandem scFv molecules (taFv) represent a straightforward format simply connecting the two scFv molecules with an additional peptide linker. The two scFv fragments present in these tandem scFv molecules form separate folding entities. Various linkers can be used to connect the two scFv fragments and linkers with a length of up to 63 residues (see Nakanishi, K., et al. (2001) Ann. Rev. Immunol. 19: 423-74). Although the parental scFv fragments can normally be expressed in soluble form in bacteria, it is, however, often observed that tandem scFv molecules form insoluble aggregates in bacteria. Hence, refolding protocols or the use of mammalian expression systems are routinely applied to produce soluble tandem scFv molecules. In a recent study, in vivo expression by transgenic rabbits and cattle of a tandem scFv directed against CD28 and a melanoma-associated proteoglycan was reported (see Gracie, J. A., et al. (1999) J. Clin. Invest. 104(10): 1393-401). In this construct, the two scFv molecules were connected by a CH1 linker and serum concentrations of up to 100 mg/L of the bispecific antibody were found. Various strategies including variations of the domain order or using middle linkers with varying length or flexibility were employed to allow soluble expression in bacteria. A few studies have now reported expression of soluble tandem scFv molecules in bacteria (see Leung, B. P., et al. (2000) J. Immunol. 164(12): 6495-502; Ito, A., et al. (2003) J. Immunol. 170(9): 4802-9; Karni, A., et al. (2002) J. Neuroimmunol. 125(1-2): 134-40) using either a very short Ala3 linker or long glycine/serine-rich linkers. In a recent study, phage display of a tandem scFv repertoire containing randomized middle linkers with a length of 3 or 6 residues was employed to enrich for those molecules that are produced in soluble and active form in bacteria. This approach resulted in the isolation of a tandem scFv molecule with a 6 amino acid residue linker (see Arndt, M. and J. Krauss (2003) Methods Mol. Biol. 207: 305-21). It is unclear whether this linker sequence represents a general solution to the soluble expression of tandem scFv molecules. Nevertheless, this study demonstrated that phage display of tandem scFv molecules in combination with directed mutagenesis is a powerful tool to enrich for these molecules, which can be expressed in bacteria in an active form.

[0008] Bispecific diabodies (Db) utilize the diabody format for expression. Diabodies are produced from scFv fragments by reducing the length of the linker connecting the VH and VL domain to approximately 5 residues (see Peipp, M. and T. Valerius (2002) Biochem. Soc. Trans. 30(4): 507-11). This reduction of linker size facilitates dimerization of two polypeptide chains by crossover pairing of the VH and VL domains. Bispecific diabodies are produced by expressing, two polypeptide chains with, either the structure VHA-VLB and VHB-VLA (VH-VL configuration), or VLA-VHB and VLB-VHA (VL-VH configuration) within the same cell. A large variety of different bispecific diabodies have been produced in the past and most of them can be expressed in soluble form in bacteria. However, a recent comparative study demonstrates that the orientation of the variable domains can influence expression and formation of active binding sites (see Mack, M. et al. (1995) Proc. Natl. Acad. Sci. USA 92(15): 7021-5). Nevertheless, soluble expression in bacteria represents an important advantage over tandem scFv molecules. However, since two different polypeptide chains are expressed within a single cell inactive homodimers can be produced together with active heterodimers. This necessitates the implementation of additional purification steps in order to obtain homogenous preparations of bispecific diabodies. One approach to force the generation of bispecific diabodies is the production of knob-into-hole diabodies (see Holliger, P., T. Prospero, and G. Winter (1993) Proc. Natl. Acad. Sci. USA 90(14): 6444-8.18). This was demonstrated for a bispecific diabody directed against HER2 and CD3. A large knob was introduced in the VH domain by exchanging Val37 with Phe and Leu45 with Trp and a complementary hole was produced in the VL domain by mutating Phe98 to Met and Tyr87 to Ala, either in the anti-HER2 or the anti-CD3 variable domains. By using this approach the production of bispecific diabodies could be increased from 72% by the parental diabody to over 90% by the knob-into-hole diabody. Importantly, production yields did only slightly decrease as a result of these mutations. However, a reduction in antigen-binding activity was observed for several analyzed constructs. Thus, this rather elaborate approach requires the analysis of various constructs in order to identify those mutations that produce heterodimeric molecule with unaltered binding activity. In addition, such approach requires mutational modification of the immunoglobulin sequence at the constant region, thus creating non-native and non-natural form of the antibody sequence, which may result in increased immunogenicity, poor in vivo stability, as well as undesirable pharmacokinetics.

[0009] Single-chain diabodies (scDb) represent an alternative strategy to improve the formation of bispecific diabody-like molecules (see Holliger, P. and G. Winter (1997) Cancer Immunol. Immunother. 45(3-4): 128-30; Wu, A. M., et al. (1996) Immunotechnology 2(1): p. 21-36). Bispecific single-chain diabodies are produced by connecting the two diabody-forming polypeptide chains with an additional middle linker with a length of approximately 15 amino acid residues. Consequently, all molecules with a molecular weight corresponding to monomeric single-chain diabodies (50-60 kDa) are bispecific. Several studies have demonstrated that bispecific single chain diabodies are expressed in bacteria in soluble and active form with the majority of purified molecules present as monomers (see Holliger, P. and G. Winter (1997) Cancer Immunol. Immunother. 45(3-4): 128-30; Wu, A. M., et al. (1996) Immunotechnol. 2(1): 21-36; Pluckthun, A. and P. Pack (1997) Immunotechnol. 3(2): 83-105; Ridgway, J. B., et al. (1996) Protein Engin. 9(7): 617-21). Thus, single-chain diabodies combine the advantages of tandem scFvs (all monomers are bispecific) and diabodies (soluble expression in bacteria).

[0010] More recently diabodies have been fused to Fc to generate more Ig-like molecules, named di-diabodies (see Lu, D., et al. (2004) J. Biol. Chem. 279(4): 2856-65). In addition, multivalent antibody construct comprising two Fab repeats in the heavy chain of an IgG and capable of binding four antigen molecules has been described (see WO 0177342A1, and Miller, K., et al. (2003) J. Immunol. 170(9): 4854-61).

[0011] There is a need in the art for improved multivalent binding proteins capable of binding two or more antigens. U.S. patent application Ser. No. 11/507,050 provides a novel family of binding proteins capable of binding two or more antigens with high affinity, which are called dual variable domain immunoglobulins (DVD-Ig™). The present invention provides further novel binding proteins capable of binding two or more antigens.

### SUMMARY OF THE INVENTION

[0012] This invention pertains to multivalent binding proteins capable of binding two or more antigens. The present invention provides a novel family of binding proteins capable of binding two or more antigens with high affinity.

[0013] In one embodiment the invention provides a binding protein comprising a polypeptide chain, wherein said polypeptide chain comprises VD1-(X1)n-VD2-C-(X2)n, wherein VD1 is a first variable domain, VD2 is a second variable domain, C is a constant domain, X1 represents an amino acid or polypeptide, X2 represents an Fc region and n is 0 or 1. In an embodiment the VD1 and VD2 in the binding protein are heavy chain variable domains. In another embodiment, the heavy chain variable domain is selected from the group consisting of a murine heavy chain variable domain, a human heavy chain variable domain, a CDR grafted heavy chain variable domain, and a humanized heavy chain variable domain. In yet another, embodiment VD1 and VD2 are capable of binding the same antigen. In another embodiment VD1 and VD2 are capable of binding different antigens. In still another embodiment, C is a heavy chain constant domain. For example, X1 is a linker with the proviso that X1 is not CH1. For example, X1 is a linker selected from the group consisting of AKTTPKLEEGEFSEAR (SEQ ID NO: 1); AKTTPKLEEGEFSEARV (SEQ ID NO: 2); AKTTPKLGG (SEQ ID NO: 3); SAKTTPKLGG (SEQ ID NO: 4); SAKTTP (SEQ ID NO: 5); RADAAP (SEQ ID NO: 6); RADAAPTVS (SEQ ID NO: 7); RADAAAAGGPGS (SEQ ID NO: 8); RADAAAA(G₄S)₄ (SEQ ID NO: 9); SAKTTPKLEEGEFSEARV (SEQ ID NO: 10); ADAAP (SEQ ID NO: 11); ADAAPTVSIFPP (SEQ ID NO: 12); TVAAP (SEQ ID NO: 13); TVAAPSVFIFPP (SEQ ID NO: 14); QPKAAP (SEQ ID NO: 15); QPKAAPSVTLFPP (SEQ ID NO: 16); AKTTPP (SEQ ID NO: 17); AKTTPPSVTPLAP (SEQ ID NO: 18); AKTTAP (SEQ ID NO: 19); AKTTAPSVYPLAP (SEQ ID NO: 20); ASTKGP (SEQ ID NO: 21); ASTKGPSVFPLAP (SEQ ID NO: 22), GGGGSGGGGSGGGGS (SEQ ID NO: 23); GENKVEYAPALMALS (SEQ ID NO: 24); GPAKELTPLKEAKVS (SEQ ID NO: 25); GHEAAAVMQVQYPAS (SEQ ID NO: 26). In an embodiment, X2 is an Fc region. In another embodiment, X2 is a variant Fc region.

[0014] In an embodiment the binding protein disclosed herein comprises a polypeptide chain, wherein said polypeptide chain comprises VD1-(X1)n-VD2-C-(X2)n, wherein VD1 is a first heavy chain variable domain, VD2 is a second heavy chain variable domain, C is a heavy chain constant domain, X1 is a linker with the proviso that it is not CH1, and X2 is an Fc region.

In an embodiment, VD1 and VD2 in the binding protein are light chain variable domains. In an embodiment, the light chain variable domain is selected from the group consisting of a murine light chain variable domain, a human light chain variable domain, a CDR grafted light chain variable domain, and a humanized light chain variable domain. In one embodiment VD1 and VD2 are capable of binding the same antigen. In another embodiment VD1 and VD2 are capable of binding different antigens. In an embodiment, C is a light chain constant domain. In another embodiment, X1 is a linker with the proviso that X1 is not CL1. In an embodiment, X1 is a linker selected from the group consisting of AKTTPKLEEGEFSEAR (SEQ ID NO: 1); AKTTPKLEEGEFSEARV (SEQ ID NO: 2); AKTTPKLGG (SEQ ID NO: 3); SAKTTPKLGG (SEQ ID NO: 4); SAKTTP (SEQ ID NO: 5); RADAAP (SEQ ID NO: 6); RADAAPTVS (SEQ ID NO: 7); RADAAAAGGPGS (SEQ ID NO: 8); RADAAAA(G₄S)₄ (SEQ ID NO: 9); SAKTTPKLEEGEFSEARV (SEQ ID NO: 10); ADAAP (SEQ ID NO: 11); ADAAPTVSIFPP (SEQ ID NO: 12); TVAAP (SEQ ID NO: 13); TVAAPSVFIFPP (SEQ ID NO: 14); QPKAAP (SEQ ID NO: 15); QPKAAPSVTLFPP (SEQ ID NO: 16); AKTTPP (SEQ ID NO: 17); AKTTPPSVTPLAP (SEQ ID NO: 18); AKTTAP (SEQ ID NO: 19); AKTTAPSVYPLAP (SEQ ID NO: 20); ASTKGP (SEQ ID NO: 21); ASTKGPSVFPLAP (SEQ ID NO: 22), GGGGSGGGGSGGGGS (SEQ ID NO: 23); GENKVEYAPALMALS (SEQ ID NO: 24); GPAKELTPLKEAKVS (SEQ ID NO: 25); GHEAAAVMQVQYPAS (SEQ ID NO: 26). In an embodiment, the binding protein does not comprise X2.

[0015] In an embodiment, both the variable heavy and variable light chain comprise the same linker. In another embodiment, the variable heavy and variable light chain comprise different linkers. In another embodiment, both the variable heavy and variable light chain comprise a short (about 6 amino acids) linker. In another embodiment, both the variable heavy and variable light chain comprise a long (greater than 6 amino acids) linker. In another embodiment, the variable heavy chain comprises a short linker and the variable light chain comprises a long linker. In another embodiment, the variable heavy chain comprises a long linker and the variable light chain comprises a short linker.

[0016] In an embodiment the binding protein disclosed herein comprises a polypeptide chain, wherein said polypeptide chain comprises VD1-(X1)n-VD2-C-(X2)n, wherein VD1 is a first light chain variable domain, VD2 is a second light chain variable domain, C is a light chain constant domain, X1 is a linker with the proviso that it is not CH1, and X2 does not comprise an Fc region.

[0017] In another embodiment the invention provides a binding protein comprising two polypeptide chains, wherein said first polypeptide chain comprises VD1-(X1)n-VD2-C-(X2)n, wherein VD1 is a first heavy chain variable domain, VD2 is a second heavy chain variable domain, C is a heavy chain constant domain, X1 is a linker with the proviso that it is not CH1, and X2 is an Fc region; and said second polypeptide chain comprises VD1-(X1)n-VD2-C-(X2)n, wherein VD1 is a first light chain variable domain, VD2 is a second light chain variable domain, C is a light chain constant domain, X1 is a linker with the proviso that it is not CH1, and X2 does not comprise an Fc region. In a particular embodiment, the Dual Variable Domain (DVD) binding protein comprises four polypeptide chains wherein the first two polypeptide chains comprises VD1-(X1)n-VD2-C-(X2)n, respectively wherein VD1 is a first heavy chain variable domain, VD2 is a second heavy chain variable domain, C is a heavy chain constant domain, X1 is a linker with the proviso that it is not CH1, and X2 is an Fc region; and the second two polypeptide chain comprises VD1-(X1)n-VD2-C-(X2)n respectively, wherein VD1 is a first light chain variable domain, VD2 is a second light chain variable domain, C is a light chain constant domain, X1 is a linker with the proviso that it is not CH1, and X2 does not comprise an Fc region. Such a Dual Variable Domain (DVD) protein has four antigen binding sites.

[0018] In another embodiment the binding proteins disclosed herein are capable of binding one or more targets. In an embodiment, the target is selected from the group consisting of cytokines, cell surface proteins, enzymes and receptors. In another embodiment, the binding protein is capable of modulating a biological function of one or more targets. In another embodiment, the binding protein is capable of neutralizing one or more targets. The binding protein of the invention is capable of binding cytokines selected from the group consisting of lymphokines, monokines, polypeptide hormones, receptors, or tumor markers. For example, the DVD-Ig of the invention is capable of binding two or more of the following: CD-3, RON, IGF1R, HGF, VEGF, DLL-4, EGFR, PLGF, ErbB3 RGMa, and tetanus toxoid (see also Table 2). In a specific embodiment the binding protein is capable of binding pairs of targets selected from the group consisting of.

[0019] In an embodiment, the binding protein capable of binding EGFR (seq. 2) and EGFR (seq. 1) comprises a DVD heavy chain amino acid sequence selected from the group consisting of SEQ ID NO. 59 and SEQ ID NO. 61; and a DVD light chain amino acid sequence selected from the group consisting of SEQ ID NO. 60 and SEQ ID NO. 62. In an embodiment, the binding protein capable of binding EGFR (seq. 2) and EGFR (seq. 1) comprises a DVD heavy chain amino acid sequence of SEQ ID NO. 59 and a DVD light chain amino acid sequence of SEQ ID NO: 60. In another embodiment, the binding protein capable of binding EGFR (seq. 2) and EGFR (seq. 1) has a reverse orientation and comprises a DVD heavy chain amino acid sequence of SEQ ID NO. 61 and a DVD light chain amino acid sequence of SEQ ID NO: 62.

[0020] In a second embodiment, the binding protein capable of binding EGFR (seq. 2) and EGFR (seq. 1) comprises a DVD heavy chain amino acid sequence selected from the group consisting of SEQ ID NO. 63 and SEQ ID NO. 65; and a DVD light chain amino acid sequence selected from the group consisting of SEQ ID NO. 64 and SEQ ID NO. 66. In an embodiment, the binding protein capable of binding EGFR (seq. 2) and EGFR (seq. 1) comprises a DVD heavy chain amino acid sequence of SEQ ID NO. 63 and a DVD light chain amino acid sequence of SEQ ID NO: 64. In another embodiment, the binding protein capable of binding EGFR (seq. 2) and EGFR (seq. 1) has a reverse orientation and comprises a DVD heavy chain amino acid sequence of SEQ ID NO. 65 and a DVD light chain amino acid sequence of SEQ ID NO: 66.

[0021] In third embodiment, the binding protein capable of binding EGFR (seq. 2) and EGFR (seq. 1) comprises a DVD heavy chain amino acid sequence selected from the group consisting of SEQ ID NO. 67 and SEQ ID NO. 69; and a DVD light chain amino acid sequence selected from the group consisting of SEQ ID NO. 68 and SEQ ID NO. 70. In an embodiment, the binding protein capable of binding EGFR (seq. 2) and EGFR (seq. 1) comprises a DVD heavy chain amino acid sequence of SEQ ID NO. 67 and a DVD light chain amino acid sequence of SEQ ID NO: 68. In another embodiment, the binding protein capable of binding EGFR (seq. 2) and EGFR (seq. 1) has a reverse orientation and comprises a DVD heavy chain amino acid sequence of SEQ ID NO. 69 and a DVD light chain amino acid sequence of SEQ ID NO: 70.

[0022] In fourth embodiment, the binding protein capable of binding EGFR (seq. 2) and EGFR (seq. 1) comprises a DVD heavy chain amino acid sequence selected from the group consisting of SEQ ID NO. 71 and SEQ ID NO. 73; and a DVD light chain amino acid sequence selected from the group consisting of SEQ ID NO. 72 and SEQ ID NO. 74. In an embodiment, the binding protein capable of binding EGFR (seq. 2) and EGFR (seq. 1) comprises a DVD heavy chain amino acid sequence of SEQ ID NO. 71 and a DVD light chain amino acid sequence of SEQ ID NO: 72. In another embodiment, the binding protein capable of binding EGFR (seq. 2) and EGFR (seq. 1) has a reverse orientation and comprises a DVD heavy chain amino acid sequence of SEQ ID NO. 73 and a DVD light chain amino acid sequence of SEQ ID NO: 74.

[0023] In an embodiment, the binding protein capable of binding EGFR (seq. 2) and RON comprises a DVD heavy chain amino acid sequence selected from the group consisting of SEQ ID NO. 75 and SEQ ID NO. 77; and a DVD light chain amino acid sequence selected from the group consisting of SEQ ID NO. 76 and SEQ ID NO. 78. In an embodiment, the binding protein capable of binding EGFR (seq. 2) and RON comprises a DVD heavy chain amino acid sequence of SEQ ID NO. 75 and a DVD light chain amino acid sequence of SEQ ID NO: 76. In another embodiment, the binding protein capable of binding EGFR (seq. 2) and RON has a reverse orientation and comprises a DVD heavy chain amino acid sequence of SEQ ID NO. 77 and a DVD light chain amino acid sequence of SEQ ID NO: 78.

[0024] In a second embodiment, the binding protein capable of binding EGFR (seq. 2) and RON comprises a DVD heavy chain amino acid sequence selected from the group consisting of SEQ ID NO. 79 and SEQ ID NO. 81; and a DVD light chain amino acid sequence selected from the group consisting of SEQ ID NO. 80 and SEQ ID NO. 82. In an embodiment, the binding protein capable of binding EGFR (seq. 2) and RON comprises a DVD heavy chain amino acid sequence of SEQ ID NO. 79 and a DVD light chain amino acid sequence of SEQ ID NO: 80. In another embodiment, the binding protein capable of binding EGFR (seq. 2) and RON has a reverse orientation and comprises a DVD heavy chain amino acid sequence of SEQ ID NO. 81 and a DVD light chain amino acid sequence of SEQ ID NO: 82.

[0025] In a third embodiment, the binding protein capable of binding EGFR (seq. 2) and RON comprises a DVD heavy chain amino acid sequence selected from the group consisting of SEQ ID NO. 83 and SEQ ID NO. 85; and a DVD light chain amino acid sequence selected from the group consisting of SEQ ID NO. 84 and SEQ ID NO. 86. In an embodiment, the binding protein capable of binding EGFR (seq. 2) and RON comprises a DVD heavy chain amino acid sequence of SEQ ID NO. 83 and a DVD light chain amino acid sequence of SEQ ID NO: 84. In another embodiment, the binding protein capable of binding EGFR (seq. 2) and RON has a reverse orientation and comprises a DVD heavy chain amino acid sequence of SEQ ID NO. 85 and a DVD light chain amino acid sequence of SEQ ID NO: 86.

[0026] In a fourth embodiment, the binding protein capable of binding EGFR (seq. 2) and RON comprises a DVD heavy chain amino acid sequence selected from the group consisting of SEQ ID NO. 87 and SEQ ID NO. 89; and a DVD light chain amino acid sequence selected from the group consisting of SEQ ID NO. 88 and SEQ ID NO. 90. In an embodiment, the binding protein capable of binding EGFR (seq. 2) and RON comprises a DVD heavy chain amino acid sequence of SEQ ID NO. 87 and a DVD light chain amino acid sequence of SEQ ID NO: 88. In another embodiment, the binding protein capable of binding EGFR (seq. 2) and RON has a reverse orientation and comprises a DVD heavy chain amino acid sequence of SEQ ID NO. 89 and a DVD light chain amino acid sequence of SEQ ID NO: 90.

[0027] In an embodiment, the binding protein capable of binding EGFR (seq. 2) and ErbB3 (seq. 1) comprises a DVD heavy chain amino acid sequence selected from the group consisting of SEQ ID NO. 91 and SEQ ID NO. 93; and a DVD light chain amino acid sequence selected from the group consisting of SEQ ID NO. 92 and SEQ ID NO. 94. In an embodiment, the binding protein capable of binding EGFR (seq. 2) and ErbB3 (seq. 1) comprises a DVD heavy chain amino acid sequence of SEQ ID NO. 91 and a DVD light chain amino acid sequence of SEQ ID NO: 92. In another embodiment, the binding protein capable of binding EGFR (seq. 2) and ErbB3 (seq. 1) has a reverse orientation and comprises a DVD heavy chain amino acid sequence of SEQ ID NO. 93 and a DVD light chain amino acid sequence of SEQ ID NO: 94.

[0028] In a second embodiment, the binding protein capable of binding EGFR (seq. 2) and ErbB3 (seq. 1) comprises a DVD heavy chain amino acid sequence selected from the group consisting of SEQ ID NO. 95 and SEQ ID NO. 97; and a DVD light chain amino acid sequence selected from the group consisting of SEQ ID NO. 96 and SEQ ID NO. 98. In an embodiment, the binding protein capable of binding EGFR (seq. 2) and ErbB3 (seq. 1) comprises a DVD heavy chain amino acid sequence of SEQ ID NO. 95 and a DVD light chain amino acid sequence of SEQ ID NO: 96. In another embodiment, the binding protein capable of binding EGFR (seq. 2) and ErbB3 (seq. 1) has a reverse orientation and comprises a DVD heavy chain amino acid sequence of SEQ ID NO. 97 and a DVD light chain amino acid sequence of SEQ ID NO: 98.

[0029] In a third embodiment, the binding protein capable of binding EGFR (seq. 2) and ErbB3 (seq. 1) comprises a DVD heavy chain amino acid sequence selected from the group consisting of SEQ ID NO. 99 and SEQ ID NO. 101; and a DVD light chain amino acid sequence selected from the group consisting of SEQ ID NO. 100 and SEQ ID NO. 102. In an embodiment, the binding protein capable of binding EGFR (seq. 2) and ErbB3 (seq. 1) comprises a DVD heavy chain amino acid sequence of SEQ ID NO. 99 and a DVD light chain amino acid sequence of SEQ ID NO: 100. In another embodiment, the binding protein capable of binding EGFR (seq. 2) and ErbB3 (seq. 1) has a reverse orientation and comprises a DVD heavy chain amino acid sequence of SEQ ID NO. 101 and a DVD light chain amino acid sequence of SEQ ID NO: 102.

[0030] In a fourth embodiment, the binding protein capable of binding EGFR (seq. 2) and ErbB3 (seq. 1) comprises a DVD heavy chain amino acid sequence selected from the group consisting of SEQ ID NO. 103 and SEQ ID NO. 105; and a DVD light chain amino acid sequence selected from the group consisting of SEQ ID NO. 104 and SEQ ID NO. 106. In an embodiment, the binding protein capable of binding EGFR (seq. 2) and ErbB3 (seq. 1) comprises a DVD heavy chain amino acid sequence of SEQ ID NO. 103 and a DVD light chain amino acid sequence of SEQ ID NO: 104. In another embodiment, the binding protein capable of binding EGFR (seq. 2) and ErbB3 (seq. 1) has a reverse orientation and comprises a DVD heavy chain amino acid sequence of SEQ ID NO. 105 and a DVD light chain amino acid sequence of SEQ ID NO: 106.

[0031] In an embodiment, the binding protein capable of binding EGFR (seq. 2) and ErbB3 (seq. 2) comprises a DVD heavy chain amino acid sequence selected from the group consisting of SEQ ID NO. 107 and SEQ ID NO. 109; and a DVD light chain amino acid sequence selected from the group consisting of SEQ ID NO. 108 and SEQ ID NO. 110. In an embodiment, the binding protein capable of binding EGFR (seq. 2) and ErbB3 (seq. 2) comprises a DVD heavy chain amino acid sequence of SEQ ID NO. 107 and a DVD light chain amino acid sequence of SEQ ID NO: 108. In another embodiment, the binding protein capable of binding EGFR (seq. 2) and ErbB3 (seq. 2) has a reverse orientation and comprises a DVD heavy chain amino acid sequence of SEQ ID NO. 109 and a DVD light chain amino acid sequence of SEQ ID NO: 110.

[0032] In a second embodiment, the binding protein capable of binding EGFR (seq. 2) and ErbB3 (seq. 2) comprises a DVD heavy chain amino acid sequence selected from the group consisting of SEQ ID NO. 111 and SEQ ID NO. 113; and a DVD light chain amino acid sequence selected from the group consisting of SEQ ID NO. 112 and SEQ ID NO. 114. In an embodiment, the binding protein capable of binding EGFR (seq. 2) and ErbB3 (seq. 2) comprises a DVD heavy chain amino acid sequence of SEQ ID NO. 111 and a DVD light chain amino acid sequence of SEQ ID NO: 112. In another embodiment, the binding protein capable of binding EGFR (seq. 2) and ErbB3 (seq. 2) has a reverse orientation and comprises a DVD heavy chain amino acid sequence of SEQ ID NO. 113 and a DVD light chain amino acid sequence of SEQ ID NO: 114.

[0033] In a third embodiment, the binding protein capable of binding EGFR (seq. 2) and ErbB3 (seq. 2) comprises a DVD heavy chain amino acid sequence selected from the group consisting of SEQ ID NO. 115 and SEQ ID NO. 117; and a DVD light chain amino acid sequence selected from the group consisting of SEQ ID NO. 116 and SEQ ID NO. 118. In an embodiment, the binding protein capable of binding EGFR (seq. 2) and ErbB3 (seq. 2) comprises a DVD heavy chain amino acid sequence of SEQ ID NO. 115 and a DVD light chain amino acid sequence of SEQ ID NO: 116. In another embodiment, the binding protein capable of binding EGFR (seq. 2) and ErbB3 (seq. 2) has a reverse orientation and comprises a DVD heavy chain amino acid sequence of SEQ ID NO. 117 and a DVD light chain amino acid sequence of SEQ ID NO: 118.

[0034] In a fourth embodiment, the binding protein capable of binding EGFR (seq. 2) and ErbB3 (seq. 2) comprises a DVD heavy chain amino acid sequence selected from the group consisting of SEQ ID NO. 119 and SEQ ID NO. 121; and a DVD light chain amino acid sequence selected from the group consisting of SEQ ID NO. 120 and SEQ ID NO. 122. In an embodiment, the binding protein capable of binding EGFR (seq. 2) and ErbB3 (seq. 2) comprises a DVD heavy chain amino acid sequence of SEQ ID NO. 119 and a DVD light chain amino acid sequence of SEQ ID NO: 120. In another embodiment, the binding protein capable of binding EGFR (seq. 2) and ErbB3 (seq. 2) has a reverse orientation and comprises a DVD heavy chain amino acid sequence of SEQ ID NO. 121 and a DVD light chain amino acid sequence of SEQ ID NO: 122.

[0035] In an embodiment, the binding protein capable of binding EGFR (seq. 2) and CD3 comprises a DVD heavy chain amino acid sequence selected from the group consisting of SEQ ID NO. 123 and SEQ ID NO. 125; and a DVD light chain amino acid sequence selected from the group consisting of SEQ ID NO. 124 and SEQ ID NO. 126. In an embodiment, the binding protein capable of binding EGFR (seq. 2) and CD3 comprises a DVD heavy chain amino acid sequence of SEQ ID NO. 123 and a DVD light chain amino acid sequence of SEQ ID NO: 124. In another embodiment, the binding protein capable of binding EGFR (seq. 2) and CD3 has a reverse orientation and comprises a DVD heavy chain amino acid sequence of SEQ ID NO. 125 and a DVD light chain amino acid sequence of SEQ ID NO: 126.

[0036] In a second embodiment, the binding protein capable of binding EGFR (seq. 2) and CD3 comprises a DVD heavy chain amino acid sequence selected from the group consisting of SEQ ID NO. 127 and SEQ ID NO. 129; and a DVD light chain amino acid sequence selected from the group consisting of SEQ ID NO. 128 and SEQ ID NO. 130. In an embodiment, the binding protein capable of binding EGFR (seq. 2) and CD3 comprises a DVD heavy chain amino acid sequence of SEQ ID NO. 127 and a DVD light chain amino acid sequence of SEQ ID NO: 128. In another embodiment, the binding protein capable of binding EGFR (seq. 2) and CD3 has a reverse orientation and comprises a DVD heavy chain amino acid sequence of SEQ ID NO. 129 and a DVD light chain amino acid sequence of SEQ ID NO: 130.

[0037] In a third embodiment, the binding protein capable of binding EGFR (seq. 2) and CD3 comprises a DVD heavy chain amino acid sequence selected from the group consisting of SEQ ID NO. 131 and SEQ ID NO. 133; and a DVD light chain amino acid sequence selected from the group consisting of SEQ ID NO. 132 and SEQ ID NO. 134. In an embodiment, the binding protein capable of binding EGFR (seq. 2) and CD3 comprises a DVD heavy chain amino acid sequence of SEQ ID NO. 131 and a DVD light chain amino acid sequence of SEQ ID NO: 132. In another embodiment, the binding protein capable of binding EGFR (seq. 2) and CD3 has a reverse orientation and comprises a DVD heavy chain amino acid sequence of SEQ ID NO. 133 and a DVD light chain amino acid sequence of SEQ ID NO: 134.

[0038] In a fourth embodiment, the binding protein capable of binding EGFR (seq. 2) and CD3 comprises a DVD heavy chain amino acid sequence selected from the group consisting of SEQ ID NO. 135 and SEQ ID NO. 137; and a DVD light chain amino acid sequence selected from the group consisting of SEQ ID NO. 136 and SEQ ID NO. 138. In an embodiment, the binding protein capable of binding EGFR (seq. 2) and CD3 comprises a DVD heavy chain amino acid sequence of SEQ ID NO. 135 and a DVD light chain amino acid sequence of SEQ ID NO: 136. In another embodiment, the binding protein capable of binding EGFR (seq. 2) and CD3 has a reverse orientation and comprises a DVD heavy chain amino acid sequence of SEQ ID NO. 137 and a DVD light chain amino acid sequence of SEQ ID NO: 138.

[0039] In an embodiment, the binding protein capable of binding EGFR (seq. 2) and IGF1R comprises a DVD heavy chain amino acid sequence selected from the group consisting of SEQ ID NO. 139 and SEQ ID NO. 141; and a DVD light chain amino acid sequence selected from the group consisting of SEQ ID NO. 140 and SEQ ID NO. 142. In an embodiment, the binding protein capable of binding EGFR (seq. 2) and IGF1R comprises a DVD heavy chain amino acid sequence of SEQ ID NO. 139 and a DVD light chain amino acid sequence of SEQ ID NO: 140. In another embodiment, the binding protein capable of binding EGFR (seq. 2) and IGF1R has a reverse orientation and comprises a DVD heavy chain amino acid sequence of SEQ ID NO. 141 and a DVD light chain amino acid sequence of SEQ ID NO: 142.

[0040] In a second embodiment, the binding protein capable of binding EGFR (seq. 2) and IGF1R comprises a DVD heavy chain amino acid sequence selected from the group consisting of SEQ ID NO. 143 and SEQ ID NO. 145; and a DVD light chain amino acid sequence selected from the group consisting of SEQ ID NO. 144 and SEQ ID NO. 146. In an embodiment, the binding protein capable of binding EGFR (seq. 2) and IGF1R comprises a DVD heavy chain amino acid sequence of SEQ ID NO. 143 and a DVD light chain amino acid sequence of SEQ ID NO: 144. In another embodiment, the binding protein capable of binding EGFR (seq. 2) and IGF1R has a reverse orientation and comprises a DVD heavy chain amino acid sequence of SEQ ID NO. 145 and a DVD light chain amino acid sequence of SEQ ID NO: 146.

[0041] In a third embodiment, the binding protein capable of binding EGFR (seq. 2) and IGF1R comprises a DVD heavy chain amino acid sequence selected from the group consisting of SEQ ID NO. 147 and SEQ ID NO. 149; and a DVD light chain amino acid sequence selected from the group consisting of SEQ ID NO. 148 and SEQ ID NO. 150. In an embodiment, the binding protein capable of binding EGFR (seq. 2) and IGF1R comprises a DVD heavy chain amino acid sequence of SEQ ID NO. 147 and a DVD light chain amino acid sequence of SEQ ID NO: 148. In another embodiment, the binding protein capable of binding EGFR (seq. 2) and IGF1R has a reverse orientation and comprises a DVD heavy chain amino acid sequence of SEQ ID NO. 149 and a DVD light chain amino acid sequence of SEQ ID NO: 150.

[0042] In a fourth embodiment, the binding protein capable of binding EGFR (seq. 2) and IGF1R comprises a DVD heavy chain amino acid sequence selected from the group consisting of SEQ ID NO. 151 and SEQ ID NO. 153; and a DVD light chain amino acid sequence selected from the group consisting of SEQ ID NO. 152 and SEQ ID NO. 154. In an embodiment, the binding protein capable of binding EGFR (seq. 2) and IGF1R comprises a DVD heavy chain amino acid sequence of SEQ ID NO. 151 and a DVD light chain amino acid sequence of SEQ ID NO: 152. In another embodiment, the binding protein capable of binding EGFR (seq. 2) and IGF1R has a reverse orientation and comprises a DVD heavy chain amino acid sequence of SEQ ID NO. 153 and a DVD light chain amino acid sequence of SEQ ID NO: 154.

[0043] In an embodiment, the binding protein capable of binding EGFR (seq. 2) and HGF comprises a DVD heavy chain amino acid sequence selected from the group consisting of SEQ ID NO. 155 and SEQ ID NO. 157; and a DVD light chain amino acid sequence selected from the group consisting of SEQ ID NO. 156 and SEQ ID NO. 158. In an embodiment, the binding protein capable of binding EGFR (seq. 2) and HGF comprises a DVD heavy chain amino acid sequence of SEQ ID NO. 155 and a DVD light chain amino acid sequence of SEQ ID NO: 156. In another embodiment, the binding protein capable of binding EGFR (seq. 2) and HGF has a reverse orientation and comprises a DVD heavy chain amino acid sequence of SEQ ID NO. 157 and a DVD light chain amino acid sequence of SEQ ID NO: 158.

[0044] In a second embodiment, the binding protein capable of binding EGFR (seq. 2) and HGF comprises a DVD heavy chain amino acid sequence selected from the group consisting of SEQ ID NO. 159 and SEQ ID NO. 161; and a DVD light chain amino acid sequence selected from the group consisting of SEQ ID NO. 160 and SEQ ID NO. 162. In an embodiment, the binding protein capable of binding EGFR (seq. 2) and HGF comprises a DVD heavy chain amino acid sequence of SEQ ID NO. 159 and a DVD light chain amino acid sequence of SEQ ID NO: 160. In another embodiment, the binding protein capable of binding EGFR (seq. 2) and HGF has a reverse orientation and comprises a DVD heavy chain amino acid sequence of SEQ ID NO. 161 and a DVD light chain amino acid sequence of SEQ ID NO: 162.

[0045] In a third embodiment, the binding protein capable of binding EGFR (seq. 2) and HGF comprises a DVD heavy chain amino acid sequence selected from the group consisting of SEQ ID NO. 163 and SEQ ID NO. 165; and a DVD light chain amino acid sequence selected from the group consisting of SEQ ID NO. 164 and SEQ ID NO. 166. In an embodiment, the binding protein capable of binding EGFR (seq. 2) and HGF comprises a DVD heavy chain amino acid sequence of SEQ ID NO. 163 and a DVD light chain amino acid sequence of SEQ ID NO: 164. In another embodiment, the binding protein capable of binding EGFR (seq. 2) and HGF has a reverse orientation and comprises a DVD heavy chain amino acid sequence of SEQ ID NO. 165 and a DVD light chain amino acid sequence of SEQ ID NO: 166.

[0046] In a fourth embodiment, the binding protein capable of binding EGFR (seq. 2) and HGF comprises a DVD heavy chain amino acid sequence selected from the group consisting of SEQ ID NO. 167 and SEQ ID NO. 169; and a DVD light chain amino acid sequence selected from the group consisting of SEQ ID NO. 168 and SEQ ID NO. 170. In an embodiment, the binding protein capable of binding EGFR (seq. 2) and HGF comprises a DVD heavy chain amino acid sequence of SEQ ID NO. 167 and a DVD light chain amino acid sequence of SEQ ID NO: 168. In another embodiment, the binding protein capable of binding EGFR (seq. 2) and HGF has a reverse orientation and comprises a DVD heavy chain amino acid sequence of SEQ ID NO. 169 and a DVD light chain amino acid sequence of SEQ ID NO: 170.

[0047] In an embodiment, the binding protein capable of binding EGFR (seq. 2) and VEGF (seq. 1) comprises a DVD heavy chain amino acid sequence selected from the group consisting of SEQ ID NO. 171 and SEQ ID NO. 173; and a DVD light chain amino acid sequence selected from the group consisting of SEQ ID NO. 172 and SEQ ID NO. 174. In an embodiment, the binding protein capable of binding EGFR (seq. 2) and VEGF (seq. 1) comprises a DVD heavy chain amino acid sequence of SEQ ID NO. 171 and a DVD light chain amino acid sequence of SEQ ID NO: 172. In another embodiment, the binding protein capable of binding EGFR (seq. 2) and VEGF (seq. 1) has a reverse orientation and comprises a DVD heavy chain amino acid sequence of SEQ ID NO. 173 and a DVD light chain amino acid sequence of SEQ ID NO: 174.

[0048] In a second embodiment, the binding protein capable of binding EGFR (seq. 2) and VEGF (seq. 1) comprises a DVD heavy chain amino acid sequence selected from the group consisting of SEQ ID NO. 175 and SEQ ID NO. 177; and a DVD light chain amino acid sequence selected from the group consisting of SEQ ID NO. 176 and SEQ ID NO. 178. In an embodiment, the binding protein capable of binding EGFR (seq. 2) and VEGF (seq. 1) comprises a DVD heavy chain amino acid sequence of SEQ ID NO. 175 and a DVD light chain amino acid sequence of SEQ ID NO: 176. In another embodiment, the binding protein capable of binding EGFR (seq. 2) and VEGF (seq. 1) has a reverse orientation and comprises a DVD heavy chain amino acid sequence of SEQ ID NO. 177 and a DVD light chain amino acid sequence of SEQ ID NO: 178.

[0049] In a third embodiment, the binding protein capable of binding EGFR (seq. 2) and VEGF (seq. 1) comprises a DVD heavy chain amino acid sequence selected from the group consisting of SEQ ID NO. 179 and SEQ ID NO. 181; and a DVD light chain amino acid sequence selected from the group consisting of SEQ ID NO. 180 and SEQ ID NO. 182. In an embodiment, the binding protein capable of binding EGFR (seq. 2) and VEGF (seq. 1) comprises a DVD heavy chain amino acid sequence of SEQ ID NO. 179 and a DVD light chain amino acid sequence of SEQ ID NO: 180. In another embodiment, the binding protein capable of binding EGFR (seq. 2) and VEGF (seq. 1) has a reverse orientation and comprises a DVD heavy chain amino acid sequence of SEQ ID NO. 181 and a DVD light chain amino acid sequence of SEQ ID NO: 182.

[0050] In a fourth embodiment, the binding protein capable of binding EGFR (seq. 2) and VEGF (seq. 1) comprises a DVD heavy chain amino acid sequence selected from the group consisting of SEQ ID NO. 183 and SEQ ID NO. 185; and a DVD light chain amino acid sequence selected from the group consisting of SEQ ID NO. 184 and SEQ ID NO. 186. In an embodiment, the binding protein capable of binding EGFR (seq. 2) and VEGF (seq. 1) comprises a DVD heavy chain amino acid sequence of SEQ ID NO. 183 and a DVD light chain amino acid sequence of SEQ ID NO: 184. In another embodiment, the binding protein capable of binding EGFR (seq. 2) and VEGF (seq. 1) has a reverse orientation and comprises a DVD heavy chain amino acid sequence of SEQ ID NO. 185 and a DVD light chain amino acid sequence of SEQ ID NO: 186.

[0051] In an embodiment, the binding protein capable of binding EGFR (seq. 2) and DLL-4 comprises a DVD heavy chain amino acid sequence selected from the group consisting of SEQ ID NO. 187 and SEQ ID NO. 189; and a DVD light chain amino acid sequence selected from the group consisting of SEQ ID NO. 188 and SEQ ID NO. 190. In an embodiment, the binding protein capable of binding EGFR (seq. 2) and DLL-4 comprises a DVD heavy chain amino acid sequence of SEQ ID NO. 187 and a DVD light chain amino acid sequence of SEQ ID NO: 188. In another embodiment, the binding protein capable of binding EGFR (seq. 2) and DLL-4 has a reverse orientation and comprises a DVD heavy chain amino acid sequence of SEQ ID NO. 189 and a DVD light chain amino acid sequence of SEQ ID NO: 190.

[0052] In a second embodiment, the binding protein capable of binding EGFR (seq. 2) and DLL-4 comprises a DVD heavy chain amino acid sequence selected from the group consisting of SEQ ID NO. 191 and SEQ ID NO. 193; and a DVD light chain amino acid sequence selected from the group consisting of SEQ ID NO. 192 and SEQ ID NO. 194. In an embodiment, the binding protein capable of binding EGFR (seq. 2) and DLL-4 comprises a DVD heavy chain amino acid sequence of SEQ ID NO. 191 and a DVD light chain amino acid sequence of SEQ ID NO: 192. In another embodiment, the binding protein capable of binding EGFR (seq. 2) and DLL-4 has a reverse orientation and comprises a DVD heavy chain amino acid sequence of SEQ ID NO. 193 and a DVD light chain amino acid sequence of SEQ ID NO: 194.

[0053] In a third embodiment, the binding protein capable of binding EGFR (seq. 2) and DLL-4 comprises a DVD heavy chain amino acid sequence selected from the group consisting of SEQ ID NO. 195 and SEQ ID NO. 197; and a DVD light chain amino acid sequence selected from the group consisting of SEQ ID NO. 196 and SEQ ID NO. 198. In an embodiment, the binding protein capable of binding EGFR (seq. 2) and DLL-4 comprises a DVD heavy chain amino acid sequence of SEQ ID NO. 195 and a DVD light chain amino acid sequence of SEQ ID NO: 196.

[0054] In another embodiment, the binding protein capable of binding EGFR (seq. 2) and DLL-4 has a reverse orientation and comprises a DVD heavy chain amino acid sequence of SEQ ID NO. 197 and a DVD light chain amino acid sequence of SEQ ID NO: 198.

[0055] In a fourth embodiment, the binding protein capable of binding EGFR (seq. 2) and DLL-4 comprises a DVD heavy chain amino acid sequence selected from the group consisting of SEQ ID NO. 199 and SEQ ID NO. 201; and a DVD light chain amino acid sequence selected from the group consisting of SEQ ID NO. 200 and SEQ ID NO. 202. In an embodiment, the binding protein capable of binding EGFR (seq. 2) and DLL-4 comprises a DVD heavy chain amino acid sequence of SEQ ID NO. 199 and a DVD light chain amino acid sequence of SEQ ID NO: 200. In another embodiment, the binding protein capable of binding EGFR (seq. 2) and DLL-4 has a reverse orientation and comprises a DVD heavy chain amino acid sequence of SEQ ID NO. 201 and a DVD light chain amino acid sequence of SEQ ID NO: 202.

[0056] In an embodiment, the binding protein capable of binding EGFR (seq. 2) and PLGF comprises a DVD heavy chain amino acid sequence selected from the group consisting of SEQ ID NO. 203 and SEQ ID NO. 205; and a DVD light chain amino acid sequence selected from the group consisting of SEQ ID NO. 204 and SEQ ID NO. 206. In an embodiment, the binding protein capable of binding EGFR (seq. 2) and PLGF comprises a DVD heavy chain amino acid sequence of SEQ ID NO. 203 and a DVD light chain amino acid sequence of SEQ ID NO: 204. In another embodiment, the binding protein capable of binding EGFR (seq. 2) and PLGF has a reverse orientation and comprises a DVD heavy chain amino acid sequence of SEQ ID NO. 205 and a DVD light chain amino acid sequence of SEQ ID NO: 206.

[0057] In a second embodiment, the binding protein capable of binding EGFR (seq. 2) and PLGF comprises a DVD heavy chain amino acid sequence selected from the group consisting of SEQ ID NO. 207 and SEQ ID NO. 209; and a DVD light chain amino acid sequence selected from the group consisting of SEQ ID NO. 208 and SEQ ID NO. 210. In an embodiment, the binding protein capable of binding EGFR (seq. 2) and PLGF comprises a DVD heavy chain amino acid sequence of SEQ ID NO. 207 and a DVD light chain amino acid sequence of SEQ ID NO: 208. In another embodiment, the binding protein capable of binding EGFR (seq. 2) and PLGF has a reverse orientation and comprises a DVD heavy chain amino acid sequence of SEQ ID NO. 209 and a DVD light chain amino acid sequence of SEQ ID NO: 210.

[0058] In a third embodiment, the binding protein capable of binding EGFR (seq. 2) and PLGF comprises a DVD heavy chain amino acid sequence selected from the group consisting of SEQ ID NO. 211 and SEQ ID NO. 213; and a DVD light chain amino acid sequence selected from the group consisting of SEQ ID NO. 212 and SEQ ID NO. 214. In an embodiment, the binding protein capable of binding EGFR (seq. 2) and PLGF comprises a DVD heavy chain amino acid sequence of SEQ ID NO. 211 and a DVD light chain amino acid sequence of SEQ ID NO: 212. In another embodiment, the binding protein capable of binding EGFR (seq. 2) and PLGF has a reverse orientation and comprises a DVD heavy chain amino acid sequence of SEQ ID NO. 213 and a DVD light chain amino acid sequence of SEQ ID NO: 214.

[0059] In a fourth embodiment, the binding protein capable of binding EGFR (seq. 2) and PLGF comprises a DVD heavy chain amino acid sequence selected from the group consisting of SEQ ID NO. 215 and SEQ ID NO. 217; and a DVD light chain amino acid sequence selected from the group consisting of SEQ ID NO. 216 and SEQ ID NO. 218. In an embodiment, the binding protein capable of binding EGFR (seq. 2) and PLGF comprises a DVD heavy chain amino acid sequence of SEQ ID NO. 215 and a DVD light chain amino acid sequence of SEQ ID NO: 216. In another embodiment, the binding protein capable of binding EGFR (seq. 2) and PLGF has a reverse orientation and comprises a DVD heavy chain amino acid sequence of SEQ ID NO. 217 and a DVD light chain amino acid sequence of SEQ ID NO: 218.

[0060] In an embodiment, the binding protein capable of binding EGFR (seq. 2) and ErbB3 (seq. 3) comprises a DVD heavy chain amino acid sequence selected from the group consisting of SEQ ID NO. 219 and SEQ ID NO. 221; and a DVD light chain amino acid sequence selected from the group consisting of SEQ ID NO. 220 and SEQ ID NO. 222. In an embodiment, the binding protein capable of binding EGFR (seq. 2) and ErbB3 (seq. 3) comprises a DVD heavy chain amino acid sequence of SEQ ID NO. 219 and a DVD light chain amino acid sequence of SEQ ID NO: 220. In another embodiment, the binding protein capable of binding EGFR (seq. 2) and ErbB3 (seq. 3) has a reverse orientation and comprises a DVD heavy chain amino acid sequence of SEQ ID NO. 221 and a DVD light chain amino acid sequence of SEQ ID NO: 222.

[0061] In a second embodiment, the binding protein capable of binding EGFR (seq. 2) and ErbB3 (seq. 3) comprises a DVD heavy chain amino acid sequence selected from the group consisting of SEQ ID NO. 223 and SEQ ID NO. 225; and a DVD light chain amino acid sequence selected from the group consisting of SEQ ID NO. 224 and SEQ ID NO. 226. In an embodiment, the binding protein capable of binding EGFR (seq. 2) and ErbB3 (seq. 3) comprises a DVD heavy chain amino acid sequence of SEQ ID NO. 223 and a DVD light chain amino acid sequence of SEQ ID NO: 224. In another embodiment, the binding protein capable of binding EGFR (seq. 2) and ErbB3 (seq. 3) has a reverse orientation and comprises a DVD heavy chain amino acid sequence of SEQ ID NO. 225 and a DVD light chain amino acid sequence of SEQ ID NO: 226.

[0062] In a third embodiment, the binding protein capable of binding EGFR (seq. 2) and ErbB3 (seq. 3) comprises a DVD heavy chain amino acid sequence selected from the group consisting of SEQ ID NO. 227 and SEQ ID NO. 229; and a DVD light chain amino acid sequence selected from the group consisting of SEQ ID NO. 228 and SEQ ID NO. 230. In an embodiment, the binding protein capable of binding EGFR (seq. 2) and ErbB3 (seq. 3) comprises a DVD heavy chain amino acid sequence of SEQ ID NO. 227 and a DVD light chain amino acid sequence of SEQ ID NO: 228. In another embodiment, the binding protein capable of binding EGFR (seq. 2) and ErbB3 (seq. 3) has a reverse orientation and comprises a DVD heavy chain amino acid sequence of SEQ ID NO. 229 and a DVD light chain amino acid sequence of SEQ ID NO: 230.

[0063] In a fourth embodiment, the binding protein capable of binding EGFR (seq. 2) and ErbB3 (seq. 3) comprises a DVD heavy chain amino acid sequence selected from the group consisting of SEQ ID NO. 231 and SEQ ID NO. 233; and a DVD light chain amino acid sequence selected from the group consisting of SEQ ID NO. 232 and SEQ ID NO. 234. In an embodiment, the binding protein capable of binding EGFR (seq. 2) and ErbB3 (seq. 3) comprises a DVD heavy chain amino acid sequence of SEQ ID NO. 231 and a DVD light chain amino acid sequence of SEQ ID NO: 232. In another embodiment, the binding protein capable of binding EGFR (seq. 2) and ErbB3 (seq. 3) has a reverse orientation and comprises a DVD heavy chain amino acid sequence of SEQ ID NO. 233 and a DVD light chain amino acid sequence of SEQ ID NO: 234.

[0064] In an embodiment, the binding protein capable of binding EGFR (seq. 2) and VEGF (seq. 2) comprises a DVD heavy chain amino acid sequence selected from the group consisting of SEQ ID NO. 235 and SEQ ID NO. 237; and a DVD light chain amino acid sequence selected from the group consisting of SEQ ID NO. 236 and SEQ ID NO. 238. In an embodiment, the binding protein capable of binding EGFR (seq. 2) and VEGF (seq. 2) comprises a DVD heavy chain amino acid sequence of SEQ ID NO. 235 and a DVD light chain amino acid sequence of SEQ ID NO: 236. In another embodiment, the binding protein capable of binding EGFR (seq. 2) and VEGF (seq. 2) has a reverse orientation and comprises a DVD heavy chain amino acid sequence of SEQ ID NO. 237 and a DVD light chain amino acid sequence of SEQ ID NO: 238.

[0065] In a second embodiment, the binding protein capable of binding EGFR (seq. 2) and VEGF (seq. 2) comprises a DVD heavy chain amino acid sequence selected from the group consisting of SEQ ID NO. 239 and SEQ ID NO. 241; and a DVD light chain amino acid sequence selected from the group consisting of SEQ ID NO. 240 and SEQ ID NO. 242. In an embodiment, the binding protein capable of binding EGFR (seq. 2) and VEGF (seq. 2) comprises a DVD heavy chain amino acid sequence of SEQ ID NO. 239 and a DVD light chain amino acid sequence of SEQ ID NO: 240. In another embodiment, the binding protein capable of binding EGFR (seq. 2) and VEGF (seq. 2) has a reverse orientation and comprises a DVD heavy chain amino acid sequence of SEQ ID NO. 241 and a DVD light chain amino acid sequence of SEQ ID NO: 242.

[0066] In a third embodiment, the binding protein capable of binding EGFR (seq. 2) and VEGF (seq. 2) comprises a DVD heavy chain amino acid sequence selected from the group consisting of SEQ ID NO. 243 and SEQ ID NO. 245; and a DVD light chain amino acid sequence selected from the group consisting of SEQ ID NO. 244 and SEQ ID NO. 246. In an embodiment, the binding protein capable of binding EGFR (seq. 2) and VEGF (seq. 2) comprises a DVD heavy chain amino acid sequence of SEQ ID NO. 243 and a DVD light chain amino acid sequence of SEQ ID NO: 244. In another embodiment, the binding protein capable of binding EGFR (seq. 2) and VEGF (seq. 2) has a reverse orientation and comprises a DVD heavy chain amino acid sequence of SEQ ID NO. 245 and a DVD light chain amino acid sequence of SEQ ID NO: 246.

[0067] In a fourth embodiment, the binding protein capable of binding EGFR (seq. 2) and VEGF (seq. 2) comprises a DVD heavy chain amino acid sequence selected from the group consisting of SEQ ID NO. 247 and SEQ ID NO. 249; and a DVD light chain amino acid sequence selected from the group consisting of SEQ ID NO. 248 and SEQ ID NO. 250. In an embodiment, the binding protein capable of binding EGFR (seq. 2) and VEGF (seq. 2) comprises a DVD heavy chain amino acid sequence of SEQ ID NO. 247 and a DVD light chain amino acid sequence of SEQ ID NO: 248. In another embodiment, the binding protein capable of binding EGFR (seq. 2) and VEGF (seq. 2) has a reverse orientation and comprises a DVD heavy chain amino acid sequence of SEQ ID NO. 249 and a DVD light chain amino acid sequence of SEQ ID NO: 250.

[0068] In an embodiment, the binding protein capable of binding EGFR (seq. 2) and VEGF (seq. 3) comprises a DVD heavy chain amino acid sequence selected from the group consisting of SEQ ID NO. 251 and SEQ ID NO. 253; and a DVD light chain amino acid sequence selected from the group consisting of SEQ ID NO. 252 and SEQ ID NO. 254. In an embodiment, the binding protein capable of binding EGFR (seq. 2) and VEGF (seq. 3) comprises a DVD heavy chain amino acid sequence of SEQ ID NO. 251 and a DVD light chain amino acid sequence of SEQ ID NO: 252. In another embodiment, the binding protein capable of binding EGFR (seq. 2) and VEGF (seq. 3) has a reverse orientation and comprises a DVD heavy chain amino acid sequence of SEQ ID NO. 253 and a DVD light chain amino acid sequence of SEQ ID NO: 254.

[0069] In a second embodiment, the binding protein capable of binding EGFR (seq. 2) and VEGF (seq. 3) comprises a DVD heavy chain amino acid sequence selected from the group consisting of SEQ ID NO. 255 and SEQ ID NO. 257; and a DVD light chain amino acid sequence selected from the group consisting of SEQ ID NO. 256 and SEQ ID NO. 258. In an embodiment, the binding protein capable of binding EGFR (seq. 2) and VEGF (seq. 3) comprises a DVD heavy chain amino acid sequence of SEQ ID NO. 255 and a DVD light chain amino acid sequence of SEQ ID NO: 256. In another embodiment, the binding protein capable of binding EGFR (seq. 2) and VEGF (seq. 3) has a reverse orientation and comprises a DVD heavy chain amino acid sequence of SEQ ID NO. 257 and a DVD light chain amino acid sequence of SEQ ID NO: 258.

[0070] In a third embodiment, the binding protein capable of binding EGFR (seq. 2) and VEGF (seq. 3) comprises a DVD heavy chain amino acid sequence selected from the group consisting of SEQ ID NO. 259 and SEQ ID NO. 261; and a DVD light chain amino acid sequence selected from the group consisting of SEQ ID NO. 260 and SEQ ID NO. 262. In an embodiment, the binding protein capable of binding EGFR (seq. 2) and VEGF (seq. 3) comprises a DVD heavy chain amino acid sequence of SEQ ID NO. 259 and a DVD light chain amino acid sequence of SEQ ID NO: 260. In another embodiment, the binding protein capable of binding EGFR (seq. 2) and VEGF (seq. 3) has a reverse orientation and comprises a DVD heavy chain amino acid sequence of SEQ ID NO. 261 and a DVD light chain amino acid sequence of SEQ ID NO: 262.

[0071] In a fourth embodiment, the binding protein capable of binding EGFR (seq. 2) and VEGF (seq. 3) comprises a DVD heavy chain amino acid sequence selected from the group consisting of SEQ ID NO. 263 and SEQ ID NO. 265; and a DVD light chain amino acid sequence selected from the group consisting of SEQ ID NO. 264 and SEQ ID NO. 266. In an embodiment, the binding protein capable of binding EGFR (seq. 2) and VEGF (seq. 3) comprises a DVD heavy chain amino acid sequence of SEQ ID NO. 263 and a DVD light chain amino acid sequence of SEQ ID NO: 264. In another embodiment, the binding protein capable of binding EGFR (seq. 2) and VEGF (seq. 3) has a reverse orientation and comprises a DVD heavy chain amino acid sequence of SEQ ID NO. 265 and a DVD light chain amino acid sequence of SEQ ID NO: 266.

[0072] In an embodiment, the binding protein capable of binding EGFR (seq. 1) and RGMa comprises a DVD heavy chain amino acid sequence selected from the group consisting of SEQ ID NO. 267 and SEQ ID NO. 269; and a DVD light chain amino acid sequence selected from the group consisting of SEQ ID NO. 268 and SEQ ID NO. 270. In an embodiment, the binding protein capable of binding EGFR (seq. 1) and RGMa comprises a DVD heavy chain amino acid sequence of SEQ ID NO. 267 and a DVD light chain amino acid sequence of SEQ ID NO: 268. In another embodiment, the binding protein capable of binding EGFR (seq. 1) and RGMa has a reverse orientation and comprises a DVD heavy chain amino acid sequence of SEQ ID NO. 269 and a DVD light chain amino acid sequence of SEQ ID NO: 270.

[0073] In a second embodiment, the binding protein capable of binding EGFR (seq. 1) and RGMa comprises a DVD heavy chain amino acid sequence selected from the group consisting of SEQ ID NO. 271 and SEQ ID NO. 273; and a DVD light chain amino acid sequence selected from the group consisting of SEQ ID NO. 272 and SEQ ID NO. 274. In an embodiment, the binding protein capable of binding EGFR (seq. 1) and RGMa comprises a DVD heavy chain amino acid sequence of SEQ ID NO. 271 and a DVD light chain amino acid sequence of SEQ ID NO: 272. In another embodiment, the binding protein capable of binding EGFR (seq. 1) and RGMa has a reverse orientation and comprises a DVD heavy chain amino acid sequence of SEQ ID NO. 273 and a DVD light chain amino acid sequence of SEQ ID NO: 274.

[0074] In a third embodiment, the binding protein capable of binding EGFR (seq. 1) and RGMa comprises a DVD heavy chain amino acid sequence selected from the group consisting of SEQ ID NO. 275 and SEQ ID NO. 277; and a DVD light chain amino acid sequence selected from the group consisting of SEQ ID NO. 276 and SEQ ID NO. 278. In an embodiment, the binding protein capable of binding EGFR (seq. 1) and RGMa comprises a DVD heavy chain amino acid sequence of SEQ ID NO. 275 and a DVD light chain amino acid sequence of SEQ ID NO: 276. In another embodiment, the binding protein capable of binding EGFR (seq. 1) and RGMa has a reverse orientation and comprises a DVD heavy chain amino acid sequence of SEQ ID NO. 277 and a DVD light chain amino acid sequence of SEQ ID NO: 278.

[0075] In a fourth embodiment, the binding protein capable of binding EGFR (seq. 1) and RGMa comprises a DVD heavy chain amino acid sequence selected from the group consisting of SEQ ID NO. 279 and SEQ ID NO. 281; and a DVD light chain amino acid sequence selected from the group consisting of SEQ ID NO. 280 and SEQ ID NO. 282. In an embodiment, the binding protein capable of binding EGFR (seq. 1) and RGMa comprises a DVD heavy chain amino acid sequence of SEQ ID NO. 279 and a DVD light chain amino acid sequence of SEQ ID NO: 280. In another embodiment, the binding protein capable of binding EGFR (seq. 1) and RGMa has a reverse orientation and comprises a DVD heavy chain amino acid sequence of SEQ ID NO. 281 and a DVD light chain amino acid sequence of SEQ ID NO: 282.

[0076] In an embodiment, the binding protein capable of binding EGFR (seq. 1) and tetanus toxoid comprises a DVD heavy chain amino acid sequence selected from the group consisting of SEQ ID NO. 283 and SEQ ID NO. 285; and a DVD light chain amino acid sequence selected from the group consisting of SEQ ID NO. 284 and SEQ ID NO. 286. In an embodiment, the binding protein capable of binding EGFR (seq. 1) and tetanus toxoid comprises a DVD heavy chain amino acid sequence of SEQ ID NO. 283 and a DVD light chain amino acid sequence of SEQ ID NO: 284. In another embodiment, the binding protein capable of binding EGFR (seq. 1) and tetanus toxoid has a reverse orientation and comprises a DVD heavy chain amino acid sequence of SEQ ID NO. 285 and a DVD light chain amino acid sequence of SEQ ID NO: 286.

[0077] In a second embodiment, the binding protein capable of binding EGFR (seq. 1) and tetanus toxoid comprises a DVD heavy chain amino acid sequence selected from the group consisting of SEQ ID NO. 287 and SEQ ID NO. 289; and a DVD light chain amino acid sequence selected from the group consisting of SEQ ID NO. 288 and SEQ ID NO. 290. In an embodiment, the binding protein capable of binding EGFR (seq. 1) and tetanus toxoid comprises a DVD heavy chain amino acid sequence of SEQ ID NO. 287 and a DVD light chain amino acid sequence of SEQ ID NO: 288. In another embodiment, the binding protein capable of binding EGFR (seq. 1) and tetanus toxoid has a reverse orientation and comprises a DVD heavy chain amino acid sequence of SEQ ID NO. 289 and a DVD light chain amino acid sequence of SEQ ID NO: 290.

[0078] In a third embodiment, the binding protein capable of binding EGFR (seq. 1) and tetanus toxoid comprises a DVD heavy chain amino acid sequence selected from the group consisting of SEQ ID NO. 291 and SEQ ID NO. 293; and a DVD light chain amino acid sequence selected from the group consisting of SEQ ID NO. 292 and SEQ ID NO. 294. In an embodiment, the binding protein capable of binding EGFR (seq. 1) and tetanus toxoid comprises a DVD heavy chain amino acid sequence of SEQ ID NO. 291 and a DVD light chain amino acid sequence of SEQ ID NO: 292. In another embodiment, the binding protein capable of binding EGFR (seq. 1) and tetanus toxoid has a reverse orientation and comprises a DVD heavy chain amino acid sequence of SEQ ID NO. 293 and a DVD light chain amino acid sequence of SEQ ID NO: 294.

[0079] In a fourth embodiment, the binding protein capable of binding EGFR (seq. 1) and tetanus toxoid comprises a DVD heavy chain amino acid sequence selected from the group consisting of SEQ ID NO. 295 and SEQ ID NO. 297; and a DVD light chain amino acid sequence selected from the group consisting of SEQ ID NO. 296 and SEQ ID NO. 298. In an embodiment, the binding protein capable of binding EGFR (seq. 1) and tetanus toxoid comprises a DVD heavy chain amino acid sequence of SEQ ID NO. 295 and a DVD light chain amino acid sequence of SEQ ID NO: 296. In another embodiment, the binding protein capable of binding EGFR (seq. 1) and tetanus toxoid has a reverse orientation and comprises a DVD heavy chain amino acid sequence of SEQ ID NO. 297 and a DVD light chain amino acid sequence of SEQ ID NO: 298.

[0080] In an embodiment, the binding protein capable of binding VEGF (seq. 1) and tetanus toxoid comprises a DVD heavy chain amino acid sequence selected from the group consisting of SEQ ID NO. 299 and SEQ ID NO. 301; and a DVD light chain amino acid sequence selected from the group consisting of SEQ ID NO. 300 and SEQ ID NO. 302. In an embodiment, the binding protein capable of binding VEGF (seq. 1) and tetanus toxoid comprises a DVD heavy chain amino acid sequence of SEQ ID NO. 299 and a DVD light chain amino acid sequence of SEQ ID NO: 300. In another embodiment, the binding protein capable of binding VEGF (seq. 1) and tetanus toxoid has a reverse orientation and comprises a DVD heavy chain amino acid sequence of SEQ ID NO. 301 and a DVD light chain amino acid sequence of SEQ ID NO: 302.

[0081] In a second embodiment, the binding protein capable of binding VEGF (seq. 1) and tetanus toxoid comprises a DVD heavy chain amino acid sequence selected from the group consisting of SEQ ID NO. 303 and SEQ ID NO. 305; and a DVD light chain amino acid sequence selected from the group consisting of SEQ ID NO. 304 and SEQ ID NO. 306. In an embodiment, the binding protein capable of binding VEGF (seq. 1) and tetanus toxoid comprises a DVD heavy chain amino acid sequence of SEQ ID NO. 303 and a DVD light chain amino acid sequence of SEQ ID NO: 304. In another embodiment, the binding protein capable of binding VEGF (seq. 1) and tetanus toxoid has a reverse orientation and comprises a DVD heavy chain amino acid sequence of SEQ ID NO. 305 and a DVD light chain amino acid sequence of SEQ ID NO: 306.

[0082] In a third embodiment, the binding protein capable of binding VEGF (seq. 1) and tetanus toxoid comprises a DVD heavy chain amino acid sequence selected from the group consisting of SEQ ID NO. 307 and SEQ ID NO. 309; and a DVD light chain amino acid sequence selected from the group consisting of SEQ ID NO. 308 and SEQ ID NO. 310. In an embodiment, the binding protein capable of binding VEGF (seq. 1) and tetanus toxoid comprises a DVD heavy chain amino acid sequence of SEQ ID NO. 307 and a DVD light chain amino acid sequence of SEQ ID NO: 308. In another embodiment, the binding protein capable of binding VEGF (seq. 1) and tetanus toxoid has a reverse orientation and comprises a DVD heavy chain amino acid sequence of SEQ ID NO. 309 and a DVD light chain amino acid sequence of SEQ ID NO: 310.

[0083] In a fourth embodiment, the binding protein capable of binding VEGF (seq. 1) and tetanus toxoid comprises a DVD heavy chain amino acid sequence selected from the group consisting of SEQ ID NO. 311 and SEQ ID NO. 313; and a DVD light chain amino acid sequence selected from the group consisting of SEQ ID NO. 312 and SEQ ID NO. 314. In an embodiment, the binding protein capable of binding VEGF (seq. 1) and tetanus toxoid comprises a DVD heavy chain amino acid sequence of SEQ ID NO. 311 and a DVD light chain amino acid sequence of SEQ ID NO: 312. In another embodiment, the binding protein capable of binding VEGF (seq. 1) and tetanus toxoid has a reverse orientation and comprises a DVD heavy chain amino acid sequence of SEQ ID NO. 313 and a DVD light chain amino acid sequence of SEQ ID NO: 314.

[0084] In an embodiment, the binding protein capable of binding tetanus toxoid and tetanus toxoid comprises a DVD heavy chain amino acid sequence selected from the group consisting of SEQ ID NO. 315 and SEQ ID NO. 317; and a DVD light chain amino acid sequence selected from the group consisting of SEQ ID NO. 316 and SEQ ID NO. 318. In an embodiment, the binding protein capable of binding tetanus toxoid and tetanus toxoid comprises a DVD heavy chain amino acid sequence of SEQ ID NO. 315 and a DVD light chain amino acid sequence of SEQ ID NO: 316. In another embodiment, the binding protein capable of binding tetanus toxoid and tetanus toxoid has a reverse orientation and comprises a DVD heavy chain amino acid sequence of SEQ ID NO. 317 and a DVD light chain amino acid sequence of SEQ ID NO: 318.

[0085] In a second embodiment, the binding protein capable of binding tetanus toxoid and tetanus toxoid comprises a DVD heavy chain amino acid sequence selected from the group consisting of SEQ ID NO. 319 and SEQ ID NO. 321; and a DVD light chain amino acid sequence selected from the group consisting of SEQ ID NO. 320 and SEQ ID NO. 322. In an embodiment, the binding protein capable of binding tetanus toxoid and tetanus toxoid comprises a DVD heavy chain amino acid sequence of SEQ ID NO. 319 and a DVD light chain amino acid sequence of SEQ ID NO: 320. In another embodiment, the binding protein capable of binding tetanus toxoid and tetanus toxoid has a reverse orientation and comprises a DVD heavy chain amino acid sequence of SEQ ID NO. 321 and a DVD light chain amino acid sequence of SEQ ID NO: 322.

[0086] In an embodiment, the EGFR VH sequence of any of the above described DVD-Ig comprises the amino acid sequence of any one of SEQ ID NOs: 323, 325, or 327. In another embodiment, the EGFR VL sequence of any of the above described DVD-Ig comprises the amino acid sequence of any one of SEQ ID NOs: 324, 326, or 328.

[0087] In another embodiment the invention provides a binding protein comprising a polypeptide chain, wherein said polypeptide chain comprises VD1-(X1)n-VD2-C-(X2)n, wherein; VD1 is a first heavy chain variable domain obtained from a first parent antibody or antigen binding portion thereof; VD2 is a second heavy chain variable domain obtained from a second parent antibody or antigen binding portion thereof; C is a heavy chain constant domain; (X1)n is a linker with the proviso that it is not CH1, wherein said (X1)n is either present or absent; and (X2)n is an Fc region, wherein said (X2)n is either present or absent. In an embodiment, the Fc region is absent from the binding protein.

[0088] In another embodiment, the invention provides a binding protein comprising a polypeptide chain, wherein said polypeptide chain comprises VD1-(X1)n-VD2-C-(X2)n, wherein, VD1 is a first light chain variable domain obtained from a first parent antibody or antigen binding portion thereof; VD2 is a second light chain variable domain obtained from a second parent antibody or antigen binding portion thereof; C is a light chain constant domain; (X1)n is a linker with the proviso that it is not CH1, wherein said (X1)n is either present or absent; and (X2)n does not comprise an Fc region, wherein said (X2)n is either present or absent. In an embodiment, (X2)n is absent from the binding protein.

[0089] In another embodiment the binding protein of the invention comprises first and second polypeptide chains, wherein said first polypeptide chain comprises a first VD1-(X1)n-VD2-C-(X2)n, wherein VD1 is a first heavy chain variable domain obtained from a first parent antibody or antigen binding portion thereof; VD2 is a second heavy chain variable domain obtained from a second parent antibody or antigen binding portion thereof; C is a heavy chain constant domain; (X1)n is a linker with the proviso that it is not CH1, wherein said (X1)n is either present or absent; and (X2)n is an Fc region, wherein said (X2)n is either present or absent; and wherein said second polypeptide chain comprises a second VD1-(X1)n-VD2-C-(X2)n, wherein VD1 is a first light chain variable domain obtained from a first parent antibody or antigen binding portion thereof; VD2 is a second light chain variable domain obtained from a second parent antibody or antigen binding portion thereof; C is a light chain constant domain; (X1)n is a linker with the proviso that it is not CH1, wherein said (X1)n is either present or absent; and (X2)n does not comprise an Fc region, wherein said (X2)n is either present or absent. In another embodiment, the binding protein comprises two first polypeptide chains and two second polypeptide chains. In yet another embodiment, (X2)n is absent from the second polypeptide. In still another embodiment, the Fc region, if present in the first polypeptide is selected from the group consisting of native sequence Fc region and a variant sequence Fc region. In still another embodiment, the Fc region is selected from the group consisting of an Fc region from an IgG1, IgG2, IgG3, IgG4, IgA, IgM, IgE, and IgD.

[0090] In another embodiment the binding protein of the invention is a DVD-Ig capable of binding two antigens comprising four polypeptide chains, wherein, first and third polypeptide chains comprise VD1-(X1)n-VD2-C-(X2)n, wherein, VD1 is a first heavy chain variable domain obtained from a first parent antibody or antigen binding portion thereof; VD2 is a second heavy chain variable domain obtained from a second parent antibody or antigen binding portion thereof; C is a heavy chain constant domain; (X1)n is a linker with the proviso that it is not CH1, wherein said (X1)n is either present or absent; and (X2)n is an Fc region, wherein said (X2)n is either present or absent; and wherein second and fourth polypeptide chains comprise VD1-(X1)n-VD2-C-(X2)n, wherein VD1 is a first light chain variable domain obtained from a first parent antibody or antigen binding portion thereof; VD2 is a second light chain variable domain obtained from a second parent antibody or antigen binding portion thereof; C is a light chain constant domain; (X1)n is a linker with the proviso that it is not CH1, wherein said (X1)n is either present or absent; and (X2)n does not comprise an Fc region, wherein said (X2)n is either present or absent.

[0091] The invention provides a method of making a DVD-Ig binding protein by preselecting the parent antibodies. In an embodiment, the method of making a Dual Variable Domain Immunoglobulin capable of binding two antigens comprising the steps of a) obtaining a first parent antibody or antigen binding portion thereof, capable of binding a first antigen; b) obtaining a second parent antibody or antigen binding portion thereof, capable of binding a second antigen; c) constructing first and third polypeptide chains comprising VD1-(X1)n-VD2-C-(X2)n, wherein, VD1 is a first heavy chain variable domain obtained from said first parent antibody or antigen binding portion thereof; VD2 is a second heavy chain variable domain obtained from said second parent antibody or antigen binding portion thereof; C is a heavy chain constant domain; (X1)n is a linker with the proviso that it is not CH1, wherein said (X1)n is either present or absent; and (X2)n is an Fc region, wherein said (X2)n is either present or absent; d) constructing second and fourth polypeptide chains comprising VD1-(X1)n-VD2-C-(X2)n, wherein, VD1 is a first light chain variable domain obtained from said first parent antibody or antigen binding portion thereof; VD2 is a second light chain variable domain obtained from said second parent antibody or antigen binding thereof; C is a light chain constant domain; (X1)n is a linker with the proviso that it is not CH1, wherein said (X1)n is either present or absent; and (X2)n does not comprise an Fc region, wherein said (X2)n is either present or absent; e) expressing said first, second, third and fourth polypeptide chains; such that a Dual Variable Domain Immunoglobulin capable of binding said first and said second antigen is generated.

[0092] In still another embodiment, the invention provides a method of generating a Dual Variable Domain Immunoglobulin capable of binding two antigens with desired properties comprising the steps of a) obtaining a first parent antibody or antigen binding portion thereof, capable of binding a first antigen and possessing at least one desired property exhibited by the Dual Variable Domain Immunoglobulin; b) obtaining a second parent antibody or antigen binding portion thereof, capable of binding a second antigen and possessing at least one desired property exhibited by the Dual Variable Domain Immunoglobulin; c) constructing first and third polypeptide chains comprising VD1-(X1)n-VD2-C-(X2)n, wherein; VD1 is a first heavy chain variable domain obtained from said first parent antibody or antigen binding portion thereof; VD2 is a second heavy chain variable domain obtained from said second parent antibody or antigen binding portion thereof; C is a heavy chain constant domain; (X1)n is a linker with the proviso that it is not CH1, wherein said (X1)n is either present or absent; and (X2)n is an Fc region, wherein said (X2)n is either present or absent; d) constructing second and fourth polypeptide chains comprising VD1-(X1)n-VD2-C-(X2)n, wherein; VD1 is a first light chain variable domain obtained from said first parent antibody or antigen binding portion thereof; VD2 is a second light chain variable domain obtained from said second parent antibody or antigen binding portion thereof; C is a light chain constant domain; (X1)n is a linker with the proviso that it is not CH1, wherein said (X1)n is either present or absent; and (X2)n does not comprise an Fc region, wherein said (X2)n is either present or absent; e) expressing said first, second, third and fourth polypeptide chains; such that a Dual Variable Domain Immunoglobulin capable of binding said first and said second antigen with desired properties is generated.

[0093] In one embodiment, the VDI of the first and second polypeptide chains disclosed herein are obtained from the same parent antibody or antigen binding portion thereof. In another embodiment, the VDI of the first and second polypeptide chains disclosed herein are obtained from different parent antibodies or antigen binding portions thereof. In another embodiment, the VD2 of the first and second polypeptide chains disclosed herein are obtained from the same parent antibody or antigen binding portion thereof. In another embodiment, the VD2 of the first and second polypeptide chains disclosed herein are obtained from different parent antibodies or antigen binding portions thereof.

[0094] In one embodiment the first parent antibody or antigen binding portion thereof, and the second parent antibody or antigen binding portion thereof, are the same antibody. In another embodiment the first parent antibody or antigen binding portion thereof, and the second parent antibody or antigen binding portion thereof, are different antibodies.

[0095] In one embodiment the first parent antibody or antigen binding portion thereof, binds a first antigen and the second parent antibody or antigen binding portion thereof, binds a second antigen. In a particular embodiment, the first and second antigens are the same antigen. In another embodiment, the parent antibodies bind different epitopes on the same antigen. In another embodiment the first and second antigens are different antigens. In another embodiment, the first parent antibody or antigen binding portion thereof, binds the first antigen with a potency different from the potency with which the second parent antibody or antigen binding portion thereof, binds the second antigen. In yet another embodiment, the first parent antibody or antigen binding portion thereof, binds the first antigen with an affinity different from the affinity with which the second parent antibody or antigen binding portion thereof, binds the second antigen.

[0096] In another embodiment the first parent antibody or antigen binding portion thereof, and the second parent antibody or antigen binding portion thereof, are selected from the group consisting of, human antibody, CDR grafted antibody, and humanized antibody. In an embodiment, the antigen binding portions are selected from the group consisting of a Fab fragment, a F(ab′)₂ fragment, a bivalent fragment comprising two Fab fragments linked by a disulfide bridge at the hinge region; a Fd fragment consisting of the VH and CH1 domains; a Fv fragment consisting of the VL and VH domains of a single arm of an antibody, a dAb fragment, an isolated complementarity determining region (CDR), a single chain antibody, and diabodies.

[0097] In another embodiment the binding protein of the invention possesses at least one desired property exhibited by the first parent antibody or antigen binding portion thereof, or the second parent antibody or antigen binding portion thereof. Alternatively, the first parent antibody or antigen binding portion thereof and the second parent antibody or antigen binding portion thereof possess at least one desired property exhibited by the Dual Variable Domain Immunoglobulin. In an embodiment, the desired property is selected from one or more antibody parameters. In another embodiment, the antibody parameters are selected from the group consisting of antigen specificity, affinity to antigen, potency, biological function, epitope recognition, stability, solubility, production efficiency, immunogenicity, pharmacokinetics, bioavailability, tissue cross reactivity, and orthologous antigen binding. In an embodiment the binding protein is multivalent. In another embodiment, the binding protein is multispecific. The multivalent and or multispecific binding proteins described herein have desirable properties particularly from a therapeutic standpoint. For instance, the multivalent and or multispecific binding protein may (1) be internalized (and/or catabolized) faster than a bivalent antibody by a cell expressing an antigen to which the antibodies bind; (2) be an agonist antibody; and/or (3) induce cell death and/or apoptosis of a cell expressing an antigen which the multivalent antibody is capable of binding to. The “parent antibody” which provides at least one antigen binding specificity of the multivalent and or multispecific binding proteins may be one which is internalized (and/or catabolized) by a cell expressing an antigen to which the antibody binds; and/or may be an agonist, cell death-inducing, and/or apoptosis-inducing antibody, and the multivalent and or multispecific binding protein as described herein may display improvement(s) in one or more of these properties. Moreover, the parent antibody may lack any one or more of these properties, but may be endowed with them when constructed as a multivalent binding protein as described herein.

[0098] In another embodiment the binding protein of the invention has an on rate constant (Kon) to one or more targets selected from the group consisting of: at least about 10² M⁻¹ s⁻¹; at least about 10³ M⁻¹ s⁻¹; at least about 10⁴ M⁻¹ s⁻¹; at least about 10⁵ M⁻¹s⁻¹; and at least about 10⁶ M⁻¹ s⁻¹, as measured by surface plasmon resonance. In an embodiment, the binding protein of the invention has an on rate constant (Kon) to one or more targets between 10² M⁻¹s⁻¹ and 10³ M⁻¹s⁻¹; between 10³ M⁻¹ s⁻¹ and 10⁴ M⁻¹ s⁻¹; between 10⁴ M⁻¹ s⁻¹ and 10⁵ M⁻¹s¹; or between 10⁵ M⁻¹s⁻¹ and 10⁶ M⁻¹s⁻¹, as measured by surface plasmon resonance.

[0099] In another embodiment the binding protein has an off rate constant (Koff) for one or more targets selected from the group consisting of: at most about 10⁻³s⁻¹; at most about 10⁻⁴s¹; at most about 10⁻⁵ s⁻¹; and at most about 10⁻⁶ s⁻¹, as measured by surface plasmon resonance. In an embodiment, the binding protein of the invention has an off rate constant (Koff) to one or more targets of 10⁻³ s⁻¹ to 10⁻⁴ s⁻¹; of 10⁻⁴ s⁻¹ to 10⁻⁵ s⁻¹; or of 10⁻⁵ s⁻¹ to 10⁻⁶ s⁻¹, as measured by surface plasmon resonance.

[0100] In another embodiment the binding protein has a dissociation constant (K_{D}) to one or more targets selected from the group consisting of: at most about 10⁻⁷ M; at most about 10⁻⁸ M; at M; most about 10⁻⁹ M; at most about 10⁻¹⁰ M; at most about 10⁻¹¹ M; at most about 10⁻¹² M; and at most 10⁻¹³M. In an embodiment, the binding protein of the invention has a dissociation constant (K_{D}) to its targets of 10⁻⁷ M to 10⁻⁸ M; of 10⁻⁸ M to 10 M; of 10 M to 10⁻¹⁰ M of 10⁻¹⁰ to 10⁻¹¹ M; of 10⁻¹¹ M to 10⁻¹² M; or of 10⁻¹² to M 10⁻¹³M.

[0101] In another embodiment, the binding protein described herein is a conjugate further comprising an agent selected from the group consisting of an immunoadhesion molecule, an imaging agent, a therapeutic agent, and a cytotoxic agent. In an embodiment, the imaging agent is selected from the group consisting of a radiolabel, an enzyme, a fluorescent label, a luminescent label, a bioluminescent label, a magnetic label, and biotin. In another embodiment, the imaging agent is a radiolabel selected from the group consisting of: ³H, ¹⁴C, ³⁵S, ⁹⁰Y, ⁹⁹Tc, ¹¹¹In, ¹²⁵I, ¹³¹I, ¹⁷⁷Lu, ¹⁶⁶Ho, and ¹⁵³Sm. In yet another embodiment, the therapeutic or cytotoxic agent is selected from the group consisting of an anti-metabolite, an alkylating agent, an antibiotic, a growth factor, a cytokine, an anti-angiogenic agent, an anti-mitotic agent, an anthracycline, toxin, and an apoptotic agent.

[0102] In another embodiment, the binding protein described herein is a crystallized binding protein and exists as a crystal. In an embodiment, the crystal is a carrier-free pharmaceutical controlled release crystal. In yet another embodiment, the crystallized binding protein has a greater half life in vivo than the soluble counterpart of said binding protein. In still another embodiment, the crystallized binding protein retains biological activity.

[0103] In another embodiment, the binding protein described herein is glycosylated. For example, the glycosylation is a human glycosylation pattern.

[0104] One aspect of the invention pertains to an isolated nucleic acid encoding any one of the binding proteins disclosed herein. A further embodiment provides a vector comprising the isolated nucleic acid disclosed herein wherein said vector is selected from the group consisting of pcDNA; pTT (Durocher et al., Nucleic Acids Research 2002, Vol 30, No. 2); pTT3 (pTT with additional multiple cloning site; pEFBOS (Mizushima, S, and Nagata, S., (1990) Nucleic acids Research Vol 18, No. 17); pBV; pJV; pcDNA3.1 TOPO, pEF6 TOPO and pBJ. In an embodiment, the vector is a vector disclosed in U.S. Patent Application Ser. No. 61/021,282.

[0105] In another aspect a host cell is transformed with the vector disclosed herein. In an embodiment, the host cell is a prokaryotic cell. In another embodiment, the host cell is E. Coli. In a related embodiment the host cell is a eukaryotic cell. In another embodiment, the eukaryotic cell is selected from the group consisting of protist cell, animal cell, plant cell and fungal cell. In yet another embodiment, the host cell is a mammalian cell including, but not limited to, CHO, COS; NS0, SP2, PER.C6 or a fungal cell such as Saccharomyces cerevisiae; or an insect cell such as Sf9.

[0106] Another aspect of the invention provides a method of producing a binding protein disclosed herein comprising culturing any one of the host cells also disclosed herein in a culture medium under conditions sufficient to produce the binding protein. In an embodiment, 50%-75% of the binding protein produced by this method is a dual specific tetravalent binding protein. In a particular embodiment, 75%-90% of the binding protein produced by this method is a dual specific tetravalent binding protein. In a particular embodiment, 90%-95% of the binding protein produced is a dual specific tetravalent binding protein.

[0107] One embodiment provides a composition for the release of a binding protein wherein the composition comprises a formulation that in turn comprises a crystallized binding protein, as disclosed herein, and an ingredient, and at least one polymeric carrier. For example, the polymeric carrier is a polymer selected from one or more of the group consisting of: poly(acrylic acid), poly(cyanoacrylates), poly(amino acids), poly(anhydrides), poly(depsipeptide), poly (esters), poly(lactic acid), poly(lactic-co-glycolic acid) or PLGA, poly(b-hydroxybutryate), poly(caprolactone), poly(dioxanone); poly(ethylene glycol), poly((hydroxypropyl)methacrylamide, poly[(organo)phosphazene], poly(ortho esters), poly(vinyl alcohol), poly(vinylpyrrolidone), maleic anhydride-alkyl vinyl ether copolymers, pluronic polyols, albumin, alginate, cellulose and cellulose derivatives, collagen, fibrin, gelatin, hyaluronic acid, oligosaccharides, glycaminoglycans, sulfated polysaccharides, blends and copolymers thereof. For example, the ingredient is selected from the group consisting of albumin, sucrose, trehalose, lactitol, gelatin, hydroxypropyl-β-cyclodextrin, methoxypolyethylene glycol and polyethylene glycol. Another embodiment provides a method for treating a mammal comprising the step of administering to the mammal an effective amount of the composition disclosed herein.

[0108] The invention also provides a pharmaceutical composition comprising a binding protein, as disclosed herein and a pharmaceutically acceptable carrier. In a further embodiment the pharmaceutical composition comprises at least one additional therapeutic agent for treating a disorder. For example, the additional agent is selected from the group consisting of: a therapeutic agent, an imaging agent, a cytotoxic agent, an angiogenesis inhibitor (including but not limited to an anti-VEGF antibody or a VEGF-trap), a kinase inhibitor (including but not limited to a KDR and a TIE-2 inhibitor), a co-stimulation molecule blocker (including but not limited to anti-B7.1, anti-B7.2, CTLA4-Ig, anti-CD20), an adhesion molecule blocker (including but not limited to an anti-LFA-1 antibody, an anti-E/L selectin antibody, a small molecule inhibitor), an anti-cytokine antibody or functional fragment thereof (including but not limited to an anti-IL-18, an anti-TNF, and an anti-IL-6/cytokine receptor antibody), methotrexate, cyclosporin, rapamycin, FK506, a detectable label or reporter, a TNF antagonist, an antirheumatic, a muscle relaxant, a narcotic, a non-steroid anti-inflammatory drug (NSAID), an analgesic, an anesthetic, a sedative, a local anesthetic, a neuromuscular blocker, an antimicrobial, an antipsoriatic, a corticosteriod, an anabolic steroid, an erythropoietin, an immunization, an immunoglobulin, an immunosuppressive, a growth hormone, a hormone replacement drug, a radiopharmaceutical, an antidepressant, an antipsychotic, a stimulant, an asthma medication, a beta agonist, an inhaled steroid, an epinephrine or analog, a cytokine, and a cytokine antagonist.

[0109] In another aspect, the invention provides a method for treating a human subject suffering from a disorder in which the target, or targets, capable of being bound by the binding protein disclosed herein is detrimental, comprising administering to the human subject a binding protein disclosed herein such that the activity of the target, or targets in the human subject is inhibited and one of more symptoms is alleviated or treatment is achieved. For example, the disorder is selected from the group comprising arthritis, osteoarthritis, juvenile chronic arthritis, septic arthritis, Lyme arthritis, psoriatic arthritis, reactive arthritis, spondyloarthropathy, systemic lupus erythematosus, Crohn's disease, ulcerative colitis, inflammatory bowel disease, insulin dependent diabetes mellitus, thyroiditis, asthma, allergic diseases, psoriasis, dermatitis scleroderma, graft versus host disease, organ transplant rejection, acute or chronic immune disease associated with organ transplantation, sarcoidosis, atherosclerosis, disseminated intravascular coagulation, Kawasaki's disease, Grave's disease, nephrotic syndrome, chronic fatigue syndrome, Wegener's granulomatosis, Henoch-Schoenlein purpurea, microscopic vasculitis of the kidneys, chronic active hepatitis, uveitis, septic shock, toxic shock syndrome, sepsis syndrome, cachexia, infectious diseases, parasitic diseases, acquired immunodeficiency syndrome, acute transverse myelitis, Huntington's chorea, Parkinson's disease, Alzheimer's disease, stroke, primary biliary cirrhosis, hemolytic anemia, malignancies, heart failure, myocardial infarction, Addison's disease, sporadic polyglandular deficiency type I and polyglandular deficiency type II, Schmidt's syndrome, adult (acute) respiratory distress syndrome, alopecia, alopecia greata, seronegative arthopathy, arthropathy, Reiter's disease, psoriatic arthropathy, ulcerative colitic arthropathy, enteropathic synovitis, chlamydia, yersinia and salmonella associated arthropathy, spondyloarthopathy, atheromatous disease/arteriosclerosis, atopic allergy, autoimmune bullous disease, pemphigus vulgaris, pemphigus foliaceus, pemphigoid, linear IgA disease, autoimmune haemolytic anaemia, Coombs positive haemolytic anaemia, acquired pernicious anaemia, juvenile pernicious anaemia, myalgic encephalitis/Royal Free Disease, chronic mucocutaneous candidiasis, giant cell arteritis, primary sclerosing hepatitis, cryptogenic autoimmune hepatitis, Acquired Immunodeficiency Disease Syndrome, Acquired Immunodeficiency Related Diseases, Hepatitis B, Hepatitis C, common varied immunodeficiency (common variable hypogammaglobulinaemia), dilated cardiomyopathy, female infertility, ovarian failure, premature ovarian failure, fibrotic lung disease, cryptogenic fibrosing alveolitis, post-inflammatory interstitial lung disease, interstitial pneumonitis, connective tissue disease associated interstitial lung disease, mixed connective tissue disease associated lung disease, systemic sclerosis associated interstitial lung disease, rheumatoid arthritis associated interstitial lung disease, systemic lupus erythematosus associated lung disease, dermatomyositis/polymyositis associated lung disease, Sjögren's disease associated lung disease, ankylosing spondylitis associated lung disease, vasculitic diffuse lung disease, haemosiderosis associated lung disease, drug-induced interstitial lung disease, fibrosis, radiation fibrosis, bronchiolitis obliterans, chronic eosinophilic pneumonia, lymphocytic infiltrative lung disease, postinfectious interstitial lung disease, gouty arthritis, autoimmune hepatitis, type-1 autoimmune hepatitis (classical autoimmune or lupoid hepatitis), type-2 autoimmune hepatitis (anti-LKM antibody hepatitis), autoimmune mediated hypoglycaemia, type B insulin resistance with acanthosis nigricans, hypoparathyroidism, acute immune disease associated with organ transplantation, chronic immune disease associated with organ transplantation, osteoarthrosis, primary sclerosing cholangitis, psoriasis type 1, psoriasis type 2, idiopathic leucopaenia, autoimmune neutropaenia, renal disease NOS, glomerulonephritides, microscopic vasulitis of the kidneys, lyme disease, discoid lupus erythematosus, male infertility idiopathic or NOS, sperm autoimmunity, multiple sclerosis (all subtypes), sympathetic ophthalmia, pulmonary hypertension secondary to connective tissue disease, Goodpasture's syndrome, pulmonary manifestation of polyarteritis nodosa, acute rheumatic fever, rheumatoid spondylitis, Still's disease, systemic sclerosis, Sjörgren's syndrome, Takayasu's disease/arteritis, autoimmune thrombocytopaenia, idiopathic thrombocytopaenia, autoimmune thyroid disease, hyperthyroidism, goitrous autoimmune hypothyroidism (Hashimoto's disease), atrophic autoimmune hypothyroidism, primary myxoedema, phacogenic uveitis, primary vasculitis, vitiligo acute liver disease, chronic liver diseases, alcoholic cirrhosis, alcohol-induced liver injury, choleosatatis, idiosyncratic liver disease, Drug-Induced hepatitis, Non-alcoholic Steatohepatitis, allergy and asthma, group B streptococci (GBS) infection, mental disorders (e.g., depression and schizophrenia), Th2 Type and Th1 Type mediated diseases, acute and chronic pain (different forms of pain), and cancers such as lung, breast, stomach, bladder, colon, pancreas, ovarian, prostate and rectal cancer and hematopoietic malignancies (leukemia and lymphoma), Abetalipoprotemia, Acrocyanosis, acute and chronic parasitic or infectious processes, acute leukemia, acute lymphoblastic leukemia (ALL), acute myeloid leukemia (AML), acute or chronic bacterial infection, acute pancreatitis, acute renal failure, adenocarcinomas, aerial ectopic beats, AIDS dementia complex, alcohol-induced hepatitis, allergic conjunctivitis, allergic contact dermatitis, allergic rhinitis, allograft rejection, alpha-1-antitrypsin deficiency, amyotrophic lateral sclerosis, anemia, angina pectoris, anterior horn cell degeneration, anti cd3 therapy, antiphospholipid syndrome, anti-receptor hypersensitivity reactions, aortic and peripheral aneuryisms, aortic dissection, arterial hypertension, arteriosclerosis, arteriovenous fistula, ataxia, atrial fibrillation (sustained or paroxysmal), atrial flutter, atrioventricular block, B cell lymphoma, bone graft rejection, bone marrow transplant (BMT) rejection, bundle branch block, Burkitt's lymphoma, Burns, cardiac arrhythmias, cardiac stun syndrome, cardiac tumors, cardiomyopathy, cardiopulmonary bypass inflammation response, cartilage transplant rejection, cerebellar cortical degenerations, cerebellar disorders, chaotic or multifocal atrial tachycardia, chemotherapy associated disorders, chronic myelocytic leukemia (CML), chronic alcoholism, chronic inflammatory pathologies, chronic lymphocytic leukemia (CLL), chronic obstructive pulmonary disease (COPD), chronic salicylate intoxication, colorectal carcinoma, congestive heart failure, conjunctivitis, contact dermatitis, cor pulmonale, coronary artery disease, Creutzfeldt-Jakob disease, culture negative sepsis, cystic fibrosis, cytokine therapy associated disorders, Dementia pugilistica, demyelinating diseases, dengue hemorrhagic fever, dermatitis, dermatologic conditions, diabetes, diabetes mellitus, diabetic ateriosclerotic disease, Diffuse Lewy body disease, dilated congestive cardiomyopathy, disorders of the basal ganglia, Down's Syndrome in middle age, drug-induced movement disorders induced by drugs which block CNS dopamine receptors, drug sensitivity, eczema, encephalomyelitis, endocarditis, endocrinopathy, epiglottitis, epstein-barr virus infection, erythromelalgia, extrapyramidal and cerebellar disorders, familial hematophagocytic lymphohistiocytosis, fetal thymus implant rejection, Friedreich's ataxia, functional peripheral arterial disorders, fungal sepsis, gas gangrene, gastric ulcer, glomerular nephritis, graft rejection of any organ or tissue, gram negative sepsis, gram positive sepsis, granulomas due to intracellular organisms, hairy cell leukemia, Hallerrorden-Spatz disease, hashimoto's thyroiditis, hay fever, heart transplant rejection, hemachromatosis, hemodialysis, hemolytic uremic syndrome/thrombolytic thrombocytopenic purpura, hemorrhage, hepatitis (A), His bundle arrythmias, HIV infection/HIV neuropathy, Hodgkin's disease, hyperkinetic movement disorders, hypersensitity reactions, hypersensitivity pneumonitis, hypertension, hypokinetic movement disorders, hypothalamic-pituitary-adrenal axis evaluation, idiopathic Addison's disease, idiopathic pulmonary fibrosis, antibody mediated cytotoxicity, Asthenia, infantile spinal muscular atrophy, inflammation of the aorta, influenza a, ionizing radiation exposure, iridocyclitis/uveitis/optic neuritis, ischemia-reperfusion injury, ischemic stroke, juvenile rheumatoid arthritis, juvenile spinal muscular atrophy, Kaposi's sarcoma, kidney transplant rejection, legionella, leishmaniasis, leprosy, lesions of the corticospinal system, lipedema, liver transplant rejection, lymphederma, malaria, malignant Lymphoma, malignant histiocytosis, malignant melanoma, meningitis, meningococcemia, metabolic/idiopathic diseases, migraine headache, mitochondrial multi.system disorder, mixed connective tissue disease, monoclonal gammopathy, multiple myeloma, multiple systems degenerations (Mencel Dejerine-Thomas Shi-Drager and Machado-Joseph), myasthenia gravis, mycobacterium avium intracellulare, mycobacterium tuberculosis, myelodyplastic syndrome, myocardial infarction, myocardial ischemic disorders, nasopharyngeal carcinoma, neonatal chronic lung disease, nephritis, nephrosis, neurodegenerative diseases, neurogenic I muscular atrophies, neutropenic fever, non-hodgkins lymphoma, occlusion of the abdominal aorta and its branches, occlusive arterial disorders, okt3 therapy, orchitis/epidydimitis, orchitis/vasectomy reversal procedures, organomegaly, osteoporosis, pancreas transplant rejection, pancreatic carcinoma, paraneoplastic syndrome/hypercalcemia of malignancy, parathyroid transplant rejection, pelvic inflammatory disease, perennial rhinitis, pericardial disease, peripheral atherlosclerotic disease, peripheral vascular disorders, peritonitis, pernicious anemia, pneumocystis carinii pneumonia, pneumonia, POEMS syndrome (polyneuropathy, organomegaly, endocrinopathy, monoclonal gammopathy, and skin changes syndrome), post perfusion syndrome, post pump syndrome, post-MI cardiotomy syndrome, preeclampsia, Progressive supranucleo Palsy, primary pulmonary hypertension, radiation therapy, Raynaud's phenomenon and disease, Raynoud's disease, Refsum's disease, regular narrow QRS tachycardia, renovascular hypertension, reperfusion injury, restrictive cardiomyopathy, sarcomas, scleroderma, senile chorea, Senile Dementia of Lewy body type, seronegative arthropathies, shock, sickle cell anemia, skin allograft rejection, skin changes syndrome, small bowel transplant rejection, solid tumors, specific arrythmias, spinal ataxia, spinocerebellar degenerations, streptococcal myositis, structural lesions of the cerebellum, Subacute sclerosing panencephalitis, Syncope, syphilis of the cardiovascular system, systemic anaphalaxis, systemic inflammatory response syndrome, systemic onset juvenile rheumatoid arthritis, T-cell or FAB ALL, Telangiectasia, thromboangitis obliterans, thrombocytopenia, toxicity, transplants, trauma/hemorrhage, type III hypersensitivity reactions, type IV hypersensitivity, unstable angina, uremia, urosepsis, urticaria, valvular heart diseases, varicose veins, vasculitis, venous diseases, venous thrombosis, ventricular fibrillation, viral and fungal infections, vital encephalitis/aseptic meningitis, vital-associated hemaphagocytic syndrome, Wernicke-Korsakoff syndrome, Wilson's disease, xenograft rejection of any organ or tissue.

[0110] In an embodiment, diseases that can be treated or diagnosed with the compositions and methods of the invention include, but are not limited to, primary and metastatic cancers, including carcinomas of breast, colon, rectum, lung, oropharynx, hypopharynx, esophagus, stomach, pancreas, liver, gallbladder and bile ducts, small intestine, urinary tract (including kidney, bladder and urothelium), female genital tract (including cervix, uterus, and ovaries as well as choriocarcinoma and gestational trophoblastic disease), male genital tract (including prostate, seminal vesicles, testes and germ cell tumors), endocrine glands (including the thyroid, adrenal, and pituitary glands), and skin, as well as hemangiomas, melanomas, sarcomas (including those arising from bone and soft tissues as well as Kaposi's sarcoma), tumors of the brain, nerves, eyes, and meninges (including astrocytomas, gliomas, glioblastomas, retinoblastomas, neuromas, neuroblastomas, Schwannomas, and meningiomas), solid tumors arising from hematopoietic malignancies such as leukemias, and lymphomas (both Hodgkin's and non-Hodgkin's lymphomas).

[0111] In an embodiment, the antibodies of the invention or antigen-binding portions thereof, are used to treat cancer or in the prevention of metastases from the tumors described herein either when used alone or in combination with radiotherapy and/or other chemotherapeutic agents.

[0112] In another aspect the invention provides a method of treating a patient suffering from a disorder comprising the step of administering any one of the binding proteins disclosed herein before, concurrent, or after the administration of a second agent, as discussed herein. In a particular embodiment the second agent is selected from the group consisting of budenoside, epidermal growth factor, corticosteroids, cyclosporin, sulfasalazine, aminosalicylates, 6-mercaptopurine, azathioprine, metronidazole, lipoxygenase inhibitors, mesalamine, olsalazine, balsalazide, antioxidants, thromboxane inhibitors, IL-1 receptor antagonists, anti-IL-1β mAbs, anti-IL-6 or IL-6 receptor mAbs, growth factors, elastase inhibitors, pyridinyl-imidazole compounds, antibodies or agonists of TNF, LT, IL-1, IL-2, IL-6, IL-7, IL-8, IL-12, IL-13, IL-15, IL-16, IL-18, IL-23, EMAP-II, GM-CSF, FGF, and PDGF, antibodies of CD2, CD3, CD4, CD8, CD-19, CD25, CD28, CD30, CD40, CD45, CD69, CD90 or their ligands, methotrexate, cyclosporin, FK506, rapamycin, mycophenolate mofetil, leflunomide, NSAIDs, ibuprofen, corticosteroids, prednisolone, phosphodiesterase inhibitors, adensosine agonists, antithrombotic agents, complement inhibitors, adrenergic agents, IRAK, NIK, IKK, p38, MAP kinase inhibitors, IL-1β converting enzyme inhibitors, TNFαconverting enzyme inhibitors, T-cell signalling inhibitors, metalloproteinase inhibitors, sulfasalazine, azathioprine, 6-mercaptopurines, angiotensin converting enzyme inhibitors, soluble cytokine receptors, soluble p55 TNF receptor, soluble p75 TNF receptor, sIL-1RI, sIL-1RII, sIL-6R, antiinflammatory cytokines, IL-4, IL-10, IL-11, IL-13 and TGFβ.

[0113] In a particular embodiment the pharmaceutical compositions disclosed herein are administered to the patient by at least one mode selected from parenteral, subcutaneous, intramuscular, intravenous, intrarticular, intrabronchial, intraabdominal, intracapsular, intracartilaginous, intracavitary, intracelial, intracerebellar, intracerebroventricular, intracolic, intracervical, intragastric, intrahepatic, intramyocardial, intraosteal, intrapelvic, intrapericardiac, intraperitoneal, intrapleural, intraprostatic, intrapulmonary, intrarectal, intrarenal, intraretinal, intraspinal, intrasynovial, intrathoracic, intrauterine, intravesical, bolus, vaginal, rectal, buccal, sublingual, intranasal, and transdermal.

One aspect of the invention provides at least one anti-idiotype antibody to at least one binding protein of the present invention. The anti-idiotype antibody includes any protein or peptide containing molecule that comprises at least a portion of an immunoglobulin molecule such as, but not limited to, at least one complementarily determining region (CDR) of a heavy or light chain or a ligand binding portion thereof, a heavy chain or light chain variable region, a heavy chain or light chain constant region, a framework region, or any portion thereof, that can be incorporated into a binding protein of the present invention.

### BRIEF DESCRIPTION OF THE DRAWINGS

[0114] FIG. 1A is a schematic representation of Dual Variable Domain (DVD)-Ig constructs and shows the strategy for generation of a DVD-Ig from two parent antibodies;

[0115] FIG. 1B, is a schematic representation of constructs DVD1-Ig, DVD2-Ig, and two chimeric mono-specific antibodies from hybridoma clones 2D13.E3 (anti-IL-1α) and 13F5.G5 (anti-IL-1β).

### DETAILED DESCRIPTION OF THE INVENTION

[0116] This invention pertains to multivalent and/or multispecific binding proteins capable of binding two or more antigens. Specifically, the invention relates to dual variable domain immunoglobulins (DVD-Ig), and pharmaceutical compositions thereof, as well as nucleic acids, recombinant expression vectors and host cells for making such DVD-Igs. Methods of using the DVD-Igs of the invention to detect specific antigens, either in vitro or in vivo are also encompassed by the invention.

[0117] Unless otherwise defined herein, scientific and technical terms used in connection with the present invention shall have the meanings that are commonly understood by those of ordinary skill in the art. The meaning and scope of the terms should be clear, however, in the event of any latent ambiguity, definitions provided herein take precedent over any dictionary or extrinsic definition. Further, unless otherwise required by context, singular terms shall include pluralities and plural terms shall include the singular. In this application, the use of “or” means “and/or” unless stated otherwise. Furthermore, the use of the term “including”, as well as other forms, such as “includes” and “included”, is not limiting. Also, terms such as “element” or “component” encompass both elements and components comprising one unit and elements and components that comprise more than one subunit unless specifically stated otherwise.

[0118] Generally, nomenclatures used in connection with, and techniques of, cell and tissue culture, molecular biology, immunology, microbiology, genetics and protein and nucleic acid chemistry and hybridization described herein are those well known and commonly used in the art. The methods and techniques of the present invention are generally performed according to conventional methods well known in the art and as described in various general and more specific references that are cited and discussed throughout the present specification unless otherwise indicated. Enzymatic reactions and purification techniques are performed according to manufacturer's specifications, as commonly accomplished in the art or as described herein. The nomenclatures used in connection with, and the laboratory procedures and techniques of, analytical chemistry, synthetic organic chemistry, and medicinal and pharmaceutical chemistry described herein are those well known and commonly used in the art. Standard techniques are used for chemical syntheses, chemical analyses, pharmaceutical preparation, formulation, and delivery, and treatment of patients.

[0119] That the present invention may be more readily understood, select terms are defined below.

[0120] The term “Polypeptide” as used herein, refers to any polymeric chain of amino acids. The terms “peptide” and “protein” are used interchangeably with the term polypeptide and also refer to a polymeric chain of amino acids. The term “polypeptide” encompasses native or artificial proteins, protein fragments and polypeptide analogs of a protein sequence. A polypeptide may be monomeric or polymeric.

[0121] The term “isolated protein” or “isolated polypeptide” is a protein or polypeptide that by virtue of its origin or source of derivation is not associated with naturally associated components that accompany it in its native state; is substantially free of other proteins from the same species; is expressed by a cell from a different species; or does not occur in nature. Thus, a polypeptide that is chemically synthesized or synthesized in a cellular system different from the cell from which it naturally originates will be “isolated” from its naturally associated components. A protein may also be rendered substantially free of naturally associated components by isolation, using protein purification techniques well known in the art.

[0122] The term “recovering” as used herein, refers to the process of rendering a chemical species such as a polypeptide substantially free of naturally associated components by isolation, e.g., using protein purification techniques well known in the art.

[0123] “Biological activity” as used herein, refers to any one or more inherent biological properties of a molecule. Biological properties include but are not limited to binding receptor; induction of cell proliferation, inhibiting cell growth, inductions of other cytokines, induction of apoptosis, and enzymatic activity.

[0124] The terms “specific binding” or “specifically binding”, as used herein, in reference to the interaction of an antibody, a protein, or a peptide with a second chemical species, mean that the interaction is dependent upon the presence of a particular structure (e.g., an antigenic determinant or epitope) on the chemical species; for example, an antibody recognizes and binds to a specific protein structure rather than to proteins generally. If an antibody is specific for epitope “A”, the presence of a molecule containing epitope A (or free, unlabeled A), in a reaction containing labeled “A” and the antibody, will reduce the amount of labeled A bound to the antibody.

[0125] The term “antibody”, as used herein, broadly refers to any immunoglobulin (Ig) molecule comprised of four polypeptide chains, two heavy (H) chains and two light (L) chains, or any functional fragment, mutant, variant, or derivation thereof, which retains the essential epitope binding features of an Ig molecule. Such mutant, variant, or derivative antibody formats are known in the art. Nonlimiting embodiments of which are discussed below.

[0126] In a full-length antibody, each heavy chain is comprised of a heavy chain variable region (abbreviated herein as HCVR or VH) and a heavy chain constant region. The heavy chain constant region is comprised of three domains, CH1, CH2 and CH3. Each light chain is comprised of a light chain variable region (abbreviated herein as LCVR or VL) and a light chain constant region. The light chain constant region is comprised of one domain, CL. The VH and VL regions can be further subdivided into regions of hypervariability, termed complementarity determining regions (CDR), interspersed with regions that are more conserved, termed framework regions (FR). Each VH and VL is composed of three CDRs and four FRs, arranged from amino-terminus to carboxy-terminus in the following order: FR1, CDR1, FR2, CDR2, FR3, CDR3, FR4. Immunoglobulin molecules can be of any type (e.g., IgG, IgE, IgM, IgD, IgA and IgY), class (e.g., IgG1, IgG2, IgG 3, IgG4, IgA1 and IgA2) or subclass.

[0127] The term “Fc region” is used to define the C-terminal region of an immunoglobulin heavy chain, which may be generated by papain digestion of an intact antibody. The Fc region may be a native sequence Fc region or a variant Fc region. The Fc region of an immunoglobulin generally comprises two constant domains, a CH2 domain and a CH3 domain, and optionally comprises a CH4 domain. Replacements of amino acid residues in the Fc portion to alter antibody effector function are known in the art (Winter, et al. U.S. Pat. Nos. 5,648,260 and 5,624,821). The Fc portion of an antibody mediates several important effector functions e.g., cytokine induction, ADCC, phagocytosis, complement dependent cytotoxicity (CDC) and half-life/clearance rate of antibody and antigen-antibody complexes. In some cases these effector functions are desirable for therapeutic antibody but in other cases might be unnecessary or even deleterious, depending on the therapeutic objectives. Certain human IgG isotypes, particularly IgG1 and IgG3, mediate ADCC and CDC via binding to FcγRs and complement C1q, respectively. Neonatal Fc receptors (FcRn) are the critical components determining the circulating half-life of antibodies. In still another embodiment at least one amino acid residue is replaced in the constant region of the antibody, for example the Fc region of the antibody, such that effector functions of the antibody are altered. The dimerization of two identical heavy chains of an immunoglobulin is mediated by the dimerization of CH3 domains and is stabilized by the disulfide bonds within the hinge region (Huber et al. Nature; 264: 415-20; Thies et al 1999 J Mol Biol; 293: 67-79.). Mutation of cysteine residues within the hinge regions to prevent heavy chain-heavy chain disulfide bonds will destabilize dimeration of CH3 domains. Residues responsible for CH3 dimerization have been identified (Dall'Acqua 1998 Biochemistry 37: 9266-73.). Therefore, it is possible to generate a monovalent half-Ig. Interestingly, these monovalent half Ig molecules have been found in nature for both IgG and IgA subclasses (Seligman 1978 Ann Immunol 129: 855-70; Biewenga et al 1983 Clin Exp Immunol 51: 395-400). The stoichiometry of FcRn: Ig Fc region has been determined to be 2:1 (West et al. 2000 Biochemistry 39: 9698-708), and half Fc is sufficient for mediating FcRn binding (Kim et al 1994 Eur J Immunol; 24: 542-548.). Mutations to disrupt the dimerization of CH3 domain may not have greater adverse effect on its FcRn binding as the residues important for CH3 dimerization are located on the inner interface of CH3 b sheet structure, whereas the region responsible for FcRn binding is located on the outside interface of CH2-CH3 domains. However the half Ig molecule may have certain advantage in tissue penetration due to its smaller size than that of a regular antibody. In one embodiment at least one amino acid residue is replaced in the constant region of the binding protein of the invention, for example the Fc region, such that the dimerization of the heavy chains is disrupted, resulting in half DVD Ig molecules.

[0128] The term “antigen-binding portion” of an antibody (or simply “antibody portion”), as used herein, refers to one or more fragments of an antibody that retain the ability to specifically bind to an antigen. It has been shown that the antigen-binding function of an antibody can be performed by fragments of a full-length antibody. Such antibody embodiments may also be bispecific, dual specific, or multi-specific formats; specifically binding to two or more different antigens. Examples of binding fragments encompassed within the term “antigen-binding portion” of an antibody include (i) a Fab fragment, a monovalent fragment consisting of the VL, VH, CL and CH1 domains; (ii) a F(ab′)₂ fragment, a bivalent fragment comprising two Fab fragments linked by a disulfide bridge at the hinge region; (iii) a Fd fragment consisting of the VH and CH1 domains; (iv) a Fv fragment consisting of the VL and VH domains of a single arm of an antibody, (v) a dAb fragment (Ward et al., (1989) Nature 341:544-546, Winter et al., PCT publication WO 90/05144 A1 herein incorporated by reference), which comprises a single variable domain; and (vi) an isolated complementarity determining region (CDR). Furthermore, although the two domains of the Fv fragment, VL and VH, are coded for by separate genes, they can be joined, using recombinant methods, by a synthetic linker that enables them to be made as a single protein chain in which the VL and VH regions pair to form monovalent molecules (known as single chain Fv (scFv); see e.g., Bird et al. (1988) Science 242:423-426; and Huston et al. (1988) Proc. Natl. Acad. Sci. USA 85:5879-5883). Such single chain antibodies are also intended to be encompassed within the term “antigen-binding portion” of an antibody. Other forms of single chain antibodies, such as diabodies are also encompassed. Diabodies are bivalent, bispecific antibodies in which VH and VL domains are expressed on a single polypeptide chain, but using a linker that is too short to allow for pairing between the two domains on the same chain, thereby forcing the domains to pair with complementary domains of another chain and creating two antigen binding sites (see e.g., Holliger, P., et al. (1993) Proc. Natl. Acad. Sci. USA 90:6444-6448; Poljak, R. J., et al. (1994) Structure 2:1121-1123). Such antibody binding portions are known in the art (Kontermann and Dubel eds., Antibody Engineering (2001) Springer-Verlag. New York. 790 pp. (ISBN 3-540-41354-5). In addition single chain antibodies also include “linear antibodies” comprising a pair of tandem Fv segments (VH-CH1-VH-CH1) which, together with complementary light chain polypeptides, form a pair of antigen binding regions (Zapata et al. Protein Eng. 8(10):1057-1062 (1995); and U.S. Pat. No. 5,641,870).

[0129] The term “multivalent binding protein” is used throughout this specification to denote a binding protein comprising two or more antigen binding sites. In an embodiment, the multivalent binding protein is engineered to have the three or more antigen binding sites, and is generally not a naturally occurring antibody. The term “multispecific binding protein” refers to a binding protein capable of binding two or more related or unrelated targets. Dual variable domain (DVD) binding proteins of the invention comprise two or more antigen binding sites and are tetravalent or multivalent binding proteins. DVDs may be monospecific, i.e., capable of binding one antigen or multispecific, i.e. capable of binding two or more antigens. DVD binding proteins comprising two heavy chain DVD polypeptides and two light chain DVD polypeptides are referred to as DVD-Ig. Each half of a DVD-Ig comprises a heavy chain DVD polypeptide, and a light chain DVD polypeptide, and two antigen binding sites. Each binding site comprises a heavy chain variable domain and a light chain variable domain with a total of 6 CDRs involved in antigen binding per antigen binding site.

[0130] The term “bispecific antibody”, as used herein, refers to full-length antibodies that are generated by quadroma technology (see Milstein, C. and A. C. Cuello, Nature, 1983. 305(5934): p. 537-40), by chemical conjugation of two different monoclonal antibodies (see Staerz, U. D., et al., Nature, 1985. 314(6012): p. 628-31), or by knob-into-hole or similar approaches which introduces mutations in the Fc region (see Holliger, P., T. Prospero, and G. Winter, Proc Natl Acad Sci USA, 1993. 90(14): p. 6444-8.18), resulting in multiple different immunoglobulin species of which only one is the functional bispecific antibody. By molecular function, a bispecific antibody binds one antigen (or epitope) on one of its two binding arms (one pair of HC/LC), and binds a different antigen (or epitope) on its second arm (a different pair of HC/LC). By this definition, a bispecific antibody has two distinct antigen binding arms (in both specificity and CDR sequences), and is monovalent for each antigen it binds to.

[0131] The term “dual-specific antibody”, as used herein, refers to full-length antibodies that can bind two different antigens (or epitopes) in each of its two binding arms (a pair of HC/LC) (see PCT publication WO 02/02773). Accordingly a dual-specific binding protein has two identical antigen binding arms, with identical specificity and identical CDR sequences, and is bivalent for each antigen it binds to.

[0132] A “functional antigen binding site” of a binding protein is one that is capable of binding a target antigen. The antigen binding affinity of the antigen binding site is not necessarily as strong as the parent antibody from which the antigen binding site is derived, but the ability to bind antigen must be measurable using any one of a variety of methods known for evaluating antibody binding to an antigen. Moreover, the antigen binding affinity of each of the antigen binding sites of a multivalent antibody herein need not be quantitatively the same.

[0133] The term “cytokine” is a generic term for proteins released by one cell population, which act on another cell population as intercellular mediators. Examples of such cytokines are lymphokines, monokines, and traditional polypeptide hormones. Included among the cytokines are growth hormone such as human growth hormone, N-methionyl human growth hormone, and bovine growth hormone; parathyroid hormone; thyroxine; insulin; proinsulin; relaxin; prorelaxin; glycoprotein hormones such as follicle stimulating hormone (FSH), thyroid stimulating hormone (TSH), and luteinizing hormone (LH); hepatic growth factor; fibroblast growth factor; prolactin; placental lactogen; tumor necrosis factor-alpha and -beta; mullerian-inhibiting substance; mouse gonadotropin-associated peptide; inhibin; activin; vascular endothelial growth factor; integrin; thrombopoietin (TPO); nerve growth factors such as NGF-alpha; platelet-growth factor; placental growth factor, transforming growth factors (TGFs) such as TGF-alpha and TGF-beta; insulin-like growth factor-1 and -11; erythropoietin (EPO); osteoinductive factors; interferons such as interferon-alpha, -beta and -gamma colony stimulating factors (CSFs) such as macrophage-CSF (M-CSF); granulocyte macrophage-CSF (GM-CSF); and granulocyte-CSF (G-CSF); interleukins (ILs) such as IL-1, IL-2, IL-3, IL-4, IL-5, IL-6, IL-7, IL-8, IL-9, IL-10, IL-11, IL-12, IL-13, IL-15, IL-18, IL-21, IL-22, IL-23, IL-33; a tumor necrosis factor such as TNF-alpha or TNF-beta; and other polypeptide factors including LIF and kit ligand (KL). As used herein, the term cytokine includes proteins from natural sources or from recombinant cell culture and biologically active equivalents of the native sequence cytokines.

[0134] The term “linker” is used to denote polypeptides comprising two or more amino acid residues joined by peptide bonds and are used to link one or more antigen binding portions. Such linker polypeptides are well known in the art (see e.g., Holliger, P., et al. (1993) Proc. Natl. Acad. Sci. USA 90:6444-6448; Poljak, R. J., et al. (1994) Structure 2:1121-1123). Exemplary linkers include, but are not limited to, AKTTPKLEEGEFSEAR (SEQ ID NO: 1); AKTTPKLEEGEFSEARV (SEQ ID NO: 2); AKTTPKLGG (SEQ ID NO: 3); SAKTTPKLGG (SEQ ID NO: 4); SAKTTP (SEQ ID NO: 5); RADAAP (SEQ ID NO: 6); RADAAPTVS (SEQ ID NO: 7); RADAAAAGGPGS (SEQ ID NO: 8); RADAAAA(G₄S)₄ (SEQ ID NO: 9); SAKTTPKLEEGEFSEARV (SEQ ID NO: 10); ADAAP (SEQ ID NO: 11); ADAAPTVSIFPP (SEQ ID NO: 12); TVAAP (SEQ ID NO: 13); TVAAPSVFIFPP (SEQ ID NO: 14); QPKAAP (SEQ ID NO: 15); QPKAAPSVTLFPP (SEQ ID NO: 16); AKTTPP (SEQ ID NO: 17); AKTTPPSVTPLAP (SEQ ID NO: 18); AKTTAP (SEQ ID NO: 19); AKTTAPSVYPLAP (SEQ ID NO: 20); ASTKGP (SEQ ID NO: 21); ASTKGPSVFPLAP (SEQ ID NO: 22), GGGGSGGGGSGGGGS (SEQ ID NO: 23); GENKVEYAPALMALS (SEQ ID NO: 24); GPAKELTPLKEAKVS (SEQ ID NO: 25); GHEAAAVMQVQYPAS (SEQ ID NO: 26).

[0135] An immunoglobulin constant domain refers to a heavy or light chain constant domain. Human IgG heavy chain and light chain constant domain amino acid sequences are known in the art.

[0136] The term “monoclonal antibody” or “mAb” as used herein refers to an antibody obtained from a population of substantially homogeneous antibodies, i.e., the individual antibodies comprising the population are identical except for possible naturally occurring mutations that may be present in minor amounts. Monoclonal antibodies are highly specific, being directed against a single antigen. Furthermore, in contrast to polyclonal antibody preparations that typically include different antibodies directed against different determinants (epitopes), each mAb is directed against a single determinant on the antigen. The modifier “monoclonal” is not to be construed as requiring production of the antibody by any particular method.

[0137] The term “human antibody”, as used herein, is intended to include antibodies having variable and constant regions derived from human germline immunoglobulin sequences. The human antibodies of the invention may include amino acid residues not encoded by human germline immunoglobulin sequences (e.g., mutations introduced by random or site-specific mutagenesis in vitro or by somatic mutation in vivo), for example in the CDRs and in particular CDR3. However, the term “human antibody”, as used herein, is not intended to include antibodies in which CDR sequences derived from the germline of another mammalian species, such as a mouse, have been grafted onto human framework sequences.

[0138] The term “recombinant human antibody”, as used herein, is intended to include all human antibodies that are prepared, expressed, created or isolated by recombinant means, such as antibodies expressed using a recombinant expression vector transfected into a host cell (described further in Section II C, below), antibodies isolated from a recombinant, combinatorial human antibody library (Hoogenboom H. R. (1997) TIB Tech. 15:62-70; Azzazy H., and Highsmith W. E. (2002) Clin. Biochem. 35:425-445; Gavilondo J. V., and Larrick J. W. (2002) BioTechniques 29:128-145; Hoogenboom H., and Chames P. (2000) Immunology Today 21:371-378), antibodies isolated from an animal (e.g., a mouse) that is transgenic for human immunoglobulin genes (see, Taylor, L. D., et al. (1992) Nucl. Acids Res. 20:6287-6295; Kellermann S-A. and Green L. L. (2002) Current Opinion in Biotechnology 13:593-597; Little M. et al. (2000) Immunology Today 21:364-370) or antibodies prepared, expressed, created or isolated by any other means that involves splicing of human immunoglobulin gene sequences to other DNA sequences. Such recombinant human antibodies have variable and constant regions derived from human germline immunoglobulin sequences. In certain embodiments, however, such recombinant human antibodies are subjected to in vitro mutagenesis (or, when an animal transgenic for human Ig sequences is used, in vivo somatic mutagenesis) and thus the amino acid sequences of the VH and VL regions of the recombinant antibodies are sequences that, while derived from and related to human germline VH and VL sequences, may not naturally exist within the human antibody germline repertoire in vivo.

[0139] An “affinity matured” antibody is an antibody with one or more alterations in one or more CDRs thereof which result an improvement in the affinity of the antibody for antigen, compared to a parent antibody which does not possess those alteration(s). Exemplary affinity matured antibodies will have nanomolar or even picomolar affinities for the target antigen. Affinity matured antibodies are produced by procedures known in the art. Marks et al. BidlTechnology 10:779-783 (1992) describes affinity maturation by VH and VL domain shuffling. Random mutagenesis of CDR and/or framework residues is described by: Barbas et al. Proc Nat. Acad. Sci, USA 91:3809-3813 (1994); Schier et al. Gene 169:147-155 (1995); Yelton et al. J. Immunol. 155:1994-2004 (1995); Jackson et al., J. Immunol. 154(7):3310-9 (1995); Hawkins et al, J. Mol. Biol. 226:889-896 (1992) and selective mutation at selective mutagenesis positions, contact or hypermutation positions with an activity enhancing amino acid residue as described in U.S. Pat. No. 6,914,128B1.

[0140] The term “chimeric antibody” refers to antibodies which comprise heavy and light chain variable region sequences from one species and constant region sequences from another species, such as antibodies having murine heavy and light chain variable regions linked to human constant regions.

[0141] The term “CDR-grafted antibody” refers to antibodies which comprise heavy and light chain variable region sequences from one species but in which the sequences of one or more of the CDR regions of VH and/or VL are replaced with CDR sequences of another species, such as antibodies having murine heavy and light chain variable regions in which one or more of the murine CDRs (e.g., CDR3) has been replaced with human CDR sequences.

[0142] The term “humanized antibody” refers to antibodies which comprise heavy and light chain variable region sequences from a non-human species (e.g., a mouse) but in which at least a portion of the VH and/or VL sequence has been altered to be more “human-like”, i.e., more similar to human germline variable sequences. One type of humanized antibody is a CDR-grafted antibody, in which human CDR sequences are introduced into non-human VH and VL sequences to replace the corresponding nonhuman CDR sequences. Also “humanized antibody” is an antibody or a variant, derivative, analog or fragment thereof which immunospecifically binds to an antigen of interest and which comprises a framework (FR) region having substantially the amino acid sequence of a human antibody and a complementary determining region (CDR) having substantially the amino acid sequence of a non-human antibody. As used herein, the term “substantially” in the context of a CDR refers to a CDR having an amino acid sequence at least 80%, at least 85%, at least 90%, at least 95%, at least 98% or at least 99% identical to the amino acid sequence of a non-human antibody CDR. A humanized antibody comprises substantially all of at least one, and typically two, variable domains (Fab, Fab′, F(ab′)2, FabC, Fv) in which all or substantially all of the CDR regions correspond to those of a non-human immunoglobulin (i.e., donor antibody) and all or substantially all of the framework regions are those of a human immunoglobulin consensus sequence. In an embodiment, a humanized antibody also comprises at least a portion of an immunoglobulin constant region (Fc), typically that of a human immunoglobulin. In some embodiments, a humanized antibody contains both the light chain as well as at least the variable domain of a heavy chain. The antibody also may include the CH1, hinge, CH2, CH3, and CH4 regions of the heavy chain. In some embodiments, a humanized antibody only contains a humanized light chain. In some embodiments, a humanized antibody only contains a humanized heavy chain. In specific embodiments, a humanized antibody only contains a humanized variable domain of a light chain and/or humanized heavy chain.

[0143] The terms “Kabat numbering”, “Kabat definitions” and “Kabat labeling” are used interchangeably herein. These terms, which are recognized in the art, refer to a system of numbering amino acid residues which are more variable (i.e. hypervariable) than other amino acid residues in the heavy and light chain variable regions of an antibody, or an antigen binding portion thereof (Kabat et al. (1971) Ann. NY Acad, Sci. 190:382-391 and, Kabat, E. A., et al. (1991) Sequences of Proteins of Immunological Interest, Fifth Edition, U.S. Department of Health and Human Services, NIH Publication No. 91-3242). For the heavy chain variable region, the hypervariable region ranges from amino acid positions 31 to 35 for CDR1, amino acid positions 50 to 65 for CDR2, and amino acid positions 95 to 102 for CDR3. For the light chain variable region, the hypervariable region ranges from amino acid positions 24 to 34 for CDR1, amino acid positions 50 to 56 for CDR2, and amino acid positions 89 to 97 for CDR3.

[0144] As used herein, the term “CDR” refers to the complementarity determining region within antibody variable sequences. There are three CDRs in each of the variable regions of the heavy chain and the light chain, which are designated CDR1, CDR2 and CDR3, for each of the variable regions. The term “CDR set” as used herein refers to a group of three CDRs that occur in a single variable region capable of binding the antigen. The exact boundaries of these CDRs have been defined differently according to different systems. The system described by Kabat (Kabat et al., Sequences of Proteins of Immunological Interest (National Institutes of Health, Bethesda, Md. (1987) and (1991)) not only provides an unambiguous residue numbering system applicable to any variable region of an antibody, but also provides precise residue boundaries defining the three CDRs. These CDRs may be referred to as Kabat CDRs. Chothia and coworkers (Chothia &Lesk, J. Mol. Biol. 196:901-917 (1987) and Chothia et al., Nature 342:877-883 (1989)) found that certain sub-portions within Kabat CDRs adopt nearly identical peptide backbone conformations, despite having great diversity at the level of amino acid sequence. These sub-portions were designated as L1, L2 and L3 or H1, H2 and H3 where the “L” and the “H” designates the light chain and the heavy chains regions, respectively. These regions may be referred to as Chothia CDRs, which have boundaries that overlap with Kabat CDRs. Other boundaries defining CDRs overlapping with the Kabat CDRs have been described by Padlan (FASEB J. 9:133-139 (1995)) and MacCallum (J Mol Biol 262(5):732-45 (1996)). Still other CDR boundary definitions may not strictly follow one of the herein systems, but will nonetheless overlap with the Kabat CDRs, although they may be shortened or lengthened in light of prediction or experimental findings that particular residues or groups of residues or even entire CDRs do not significantly impact antigen binding. The methods used herein may utilize CDRs defined according to any of these systems, although certain embodiments use Kabat or Chothia defined CDRs.

[0145] As used herein, the term “framework” or “framework sequence” refers to the remaining sequences of a variable region minus the CDRs. Because the exact definition of a CDR sequence can be determined by different systems, the meaning of a framework sequence is subject to correspondingly different interpretations. The six CDRs (CDR-L1, -L2, and -L3 of light chain and CDR-H1, -H2, and -H3 of heavy chain) also divide the framework regions on the light chain and the heavy chain into four sub-regions (FR1, FR2, FR3 and FR4) on each chain, in which CDR1 is positioned between FR1 and FR2, CDR2 between FR2 and FR3, and CDR3 between FR3 and FR4. Without specifying the particular sub-regions as FR1, FR2, FR3 or FR4, a framework region, as referred by others, represents the combined FR's within the variable region of a single, naturally occurring immunoglobulin chain. As used herein, a FR represents one of the four sub-regions, and FRs represents two or more of the four sub-regions constituting a framework region.

[0146] As used herein, the term “germline antibody gene” or “gene fragment” refers to an immunoglobulin sequence encoded by non-lymphoid cells that have not undergone the maturation process that leads to genetic rearrangement and mutation for expression of a particular immunoglobulin. (See, e.g., Shapiro et al., Crit. Rev. Immunol. 22(3): 183-200 (2002); Marchalonis et al., Adv Exp Med. Biol. 484:13-30 (2001)). One of the advantages provided by various embodiments of the present invention stems from the recognition that germline antibody genes are more likely than mature antibody genes to conserve essential amino acid sequence structures characteristic of individuals in the species, hence less likely to be recognized as from a foreign source when used therapeutically in that species.

[0147] As used herein, the term “neutralizing” refers to counteracting the biological activity of an antigen when a binding protein specifically binds the antigen. In an embodiment, the neutralizing binding protein binds the cytokine and reduces its biologically activity by at least about 20%, 40%, 60%, 80%, 85% or more.

[0148] The term “activity” includes activities such as the binding specificity and affinity of a DVD-Ig for two or more antigens.

[0149] The term “epitope” includes any polypeptide determinant capable of specific binding to an immunoglobulin or T-cell receptor. In certain embodiments, epitope determinants include chemically active surface groupings of molecules such as amino acids, sugar side chains, phosphoryl, or sulfonyl, and, in certain embodiments, may have specific three dimensional structural characteristics, and/or specific charge characteristics. An epitope is a region of an antigen that is bound by an antibody. In certain embodiments, an antibody is said to specifically bind an antigen when it recognizes its target antigen in a complex mixture of proteins and/or macromolecules. Antibodies are said to “bind to the same epitope” if the antibodies cross-compete (one prevents the binding or modulating effect of the other). In addition structural definitions of epitopes (overlapping, similar, identical) are informative, but functional definitions are often more relevant as they encompass structural (binding) and functional (modulation, competition) parameters.

[0150] The term “surface plasmon resonance”, as used herein, refers to an optical phenomenon that allows for the analysis of real-time biospecific interactions by detection of alterations in protein concentrations within a biosensor matrix, for example using the BIAcore system (Pharmacia Biosensor AB, Uppsala, Sweden and Piscataway, N.J.). For further descriptions, see Jonsson, U., et al. (1993) Ann. Biol. Clin. 51:19-26; Jonsson, U., et al. (1991) Biotechniques 11:620-627; Johnsson, B., et al. (1995) J. Mol. Recognit. 8:125-131; and Johnnson, B., et al. (1991) Anal. Biochem. 198:268-277.

[0151] The term “Kₒₙ”, as used herein, is intended to refer to the on rate constant for association of a binding protein (e.g., an antibody) to the antigen to form the, e.g., antibody/antigen complex as is known in the art.

[0152] The term “K_{off}”, as used herein, is intended to refer to the off rate constant for dissociation of a binding protein (e.g., an antibody) from the, e.g., antibody/antigen complex as is known in the art.

[0153] The term “K_{d}”, as used herein, is intended to refer to the dissociation constant of a particular binding protein (e.g., an antibody)-antigen interaction as is known in the art.

[0154] The term “labeled binding protein” as used herein, refers to a protein with a label incorporated that provides for the identification of the binding protein. In an embodiment, the label is a detectable marker, e.g., incorporation of a radiolabeled amino acid or attachment to a polypeptide of biotinyl moieties that can be detected by marked avidin (e.g., streptavidin containing a fluorescent marker or enzymatic activity that can be detected by optical or colorimetric methods). Examples of labels for polypeptides include, but are not limited to, the following: radioisotopes or radionuclides (e.g., ³H, ¹⁴C, ³⁵S, ⁹⁰Y, ⁹⁹Tc, ¹¹¹In, ¹²⁵I, ¹³¹I, ¹⁷⁷Lu, ¹⁶⁶Ho, or ¹⁵³Sm); fluorescent labels (e.g., FITC, rhodamine, lanthanide phosphors), enzymatic labels (e.g., horseradish peroxidase, luciferase, alkaline phosphatase); chemiluminescent markers; biotinyl groups; predetermined polypeptide epitopes recognized by a secondary reporter (e.g., leucine zipper pair sequences, binding sites for secondary antibodies, metal binding domains, epitope tags); and magnetic agents, such as gadolinium chelates.

[0155] The term “conjugate” refers to a binding protein, such as an antibody, chemically linked to a second chemical moiety, such as a therapeutic or cytotoxic agent. The term “agent” is used herein to denote a chemical compound, a mixture of chemical compounds, a biological macromolecule, or an extract made from biological materials. In an embodiment, the therapeutic or cytotoxic agents include, but are not limited to, pertussis toxin, taxol, cytochalasin B, gramicidin D, ethidium bromide, emetine, mitomycin, etoposide, tenoposide, vincristine, vinblastine, colchicin, doxorubicin, daunorubicin, dihydroxy anthracin dione, mitoxantrone, mithramycin, actinomycin D, 1-dehydrotestosterone, glucocorticoids, procaine, tetracaine, lidocaine, propranolol, and puromycin and analogs or homologs thereof.

[0156] The terms “crystal” and “crystallized” as used herein, refer to a binding protein (e.g., an antibody), or antigen binding portion thereof, that exists in the form of a crystal. Crystals are one form of the solid state of matter, which is distinct from other forms such as the amorphous solid state or the liquid crystalline state. Crystals are composed of regular, repeating, three-dimensional arrays of atoms, ions, molecules (e.g., proteins such as antibodies), or molecular assemblies (e.g., antigen/antibody complexes). These three-dimensional arrays are arranged according to specific mathematical relationships that are well-understood in the field. The fundamental unit, or building block, that is repeated in a crystal is called the asymmetric unit. Repetition of the asymmetric unit in an arrangement that conforms to a given, well-defined crystallographic symmetry provides the “unit cell” of the crystal. Repetition of the unit cell by regular translations in all three dimensions provides the crystal. See Giege, R. and Ducruix, A. Barrett, Crystallization of Nucleic Acids and Proteins, a Practical Approach, 2nd ea., pp. 20 1-16, Oxford University Press, New York, N.Y., (1999).”

[0157] The term “polynucleotide” means a polymeric form of two or more nucleotides, either ribonucleotides or deoxynucleotides or a modified form of either type of nucleotide. The term includes single and double stranded forms of DNA.

[0158] The term “isolated polynucleotide” shall mean a polynucleotide (e.g., of genomic, cDNA, or synthetic origin, or some combination thereof) that, by virtue of its origin, the “isolated polynucleotide” is not associated with all or a portion of a polynucleotide with which the “isolated polynucleotide” is found in nature; is operably linked to a polynucleotide that it is not linked to in nature; or does not occur in nature as part of a larger sequence.

[0159] The term “vector”, is intended to refer to a nucleic acid molecule capable of transporting another nucleic acid to which it has been linked. One type of vector is a “plasmid”, which refers to a circular double stranded DNA loop into which additional DNA segments may be ligated. Another type of vector is a viral vector, wherein additional DNA segments may be ligated into the viral genome. Certain vectors are capable of autonomous replication in a host cell into which they are introduced (e.g., bacterial vectors having a bacterial origin of replication and episomal mammalian vectors). Other vectors (e.g., non-episomal mammalian vectors) can be integrated into the genome of a host cell upon introduction into the host cell, and thereby are replicated along with the host genome. Moreover, certain vectors are capable of directing the expression of genes to which they are operatively linked. Such vectors are referred to herein as “recombinant expression vectors” (or simply, “expression vectors”). In general, expression vectors of utility in recombinant DNA techniques are often in the form of plasmids. In the present specification, “plasmid” and “vector” may be used interchangeably as the plasmid is the most commonly used form of vector. However, the invention is intended to include such other forms of expression vectors, such as viral vectors (e.g., replication defective retroviruses, adenoviruses and adeno-associated viruses), which serve equivalent functions.

[0160] The term “operably linked” refers to a juxtaposition wherein the components described are in a relationship permitting them to function in their intended manner. A control sequence “operably linked” to a coding sequence is ligated in such a way that expression of the coding sequence is achieved under conditions compatible with the control sequences. “Operably linked” sequences include both expression control sequences that are contiguous with the gene of interest and expression control sequences that act in trans or at a distance to control the gene of interest. The term “expression control sequence” as used herein refers to polynucleotide sequences which are necessary to effect the expression and processing of coding sequences to which they are ligated. Expression control sequences include appropriate transcription initiation, termination, promoter and enhancer sequences; efficient RNA processing signals such as splicing and polyadenylation signals; sequences that stabilize cytoplasmic mRNA; sequences that enhance translation efficiency (i.e., Kozak consensus sequence); sequences that enhance protein stability; and when desired, sequences that enhance protein secretion. The nature of such control sequences differs depending upon the host organism; in prokaryotes, such control sequences generally include promoter, ribosomal binding site, and transcription termination sequence; in eukaryotes, generally, such control sequences include promoters and transcription termination sequence. The term “control sequences” is intended to include components whose presence is essential for expression and processing, and can also include additional components whose presence is advantageous, for example, leader sequences and fusion partner sequences.

[0161] “Transformation”, refers to any process by which exogenous DNA enters a host cell. Transformation may occur under natural or artificial conditions using various methods well known in the art. Transformation may rely on any known method for the insertion of foreign nucleic acid sequences into a prokaryotic or eukaryotic host cell. The method is selected based on the host cell being transformed and may include, but is not limited to, viral infection, electroporation, lipofection, and particle bombardment. Such “transformed” cells include stably transformed cells in which the inserted DNA is capable of replication either as an autonomously replicating plasmid or as part of the host chromosome. They also include cells which transiently express the inserted DNA or RNA for limited periods of time.

[0162] The term “recombinant host cell” (or simply “host cell”), is intended to refer to a cell into which exogenous DNA has been introduced. It should be understood that such terms are intended to refer not only to the particular subject cell, but, to the progeny of such a cell. Because certain modifications may occur in succeeding generations due to either mutation or environmental influences, such progeny may not, in fact, be identical to the parent cell, but are still included within the scope of the term “host cell” as used herein. In an embodiment, host cells include prokaryotic and eukaryotic cells selected from any of the Kingdoms of life. In another embodiment, eukaryotic cells include protist, fungal, plant and animal cells. In another embodiment, host cells include but are not limited to the prokaryotic cell line E. Coli; mammalian cell lines CHO, HEK 293, COS, NS0, SP2 and PER.C6; the insect cell line Sf9; and the fungal cell Saccharomyces cerevisiae.

[0163] Standard techniques may be used for recombinant DNA, oligonucleotide synthesis, and tissue culture and transformation (e.g., electroporation, lipofection). Enzymatic reactions and purification techniques may be performed according to manufacturer's specifications or as commonly accomplished in the art or as described herein. The foregoing techniques and procedures may be generally performed according to conventional methods well known in the art and as described in various general and more specific references that are cited and discussed throughout the present specification. See e.g., Sambrook et al. Molecular Cloning: A Laboratory Manual (2d ed., Cold Spring Harbor Laboratory Press, Cold Spring Harbor, N.Y. (1989)), which is incorporated herein by reference for any purpose.

[0164] “Transgenic organism”, as known in the art, refers to an organism having cells that contain a transgene, wherein the transgene introduced into the organism (or an ancestor of the organism) expresses a polypeptide not naturally expressed in the organism. A “transgene” is a DNA construct, which is stably and operably integrated into the genome of a cell from which a transgenic organism develops, directing the expression of an encoded gene product in one or more cell types or tissues of the transgenic organism.

[0165] The term “regulate” and “modulate” are used interchangeably, and, as used herein, refers to a change or an alteration in the activity of a molecule of interest (e.g., the biological activity of a cytokine). Modulation may be an increase or a decrease in the magnitude of a certain activity or function of the molecule of interest. Exemplary activities and functions of a molecule include, but are not limited to, binding characteristics, enzymatic activity, cell receptor activation, and signal transduction.

[0166] Correspondingly, the term “modulator” is a compound capable of changing or altering an activity or function of a molecule of interest (e.g., the biological activity of a cytokine). For example, a modulator may cause an increase or decrease in the magnitude of a certain activity or function of a molecule compared to the magnitude of the activity or function observed in the absence of the modulator. In certain embodiments, a modulator is an inhibitor, which decreases the magnitude of at least one activity or function of a molecule. Exemplary inhibitors include, but are not limited to, proteins, peptides, antibodies, peptibodies, carbohydrates or small organic molecules. Peptibodies are described, e.g., in WO01/83525.

[0167] The term “agonist”, refers to a modulator that, when contacted with a molecule of interest, causes an increase in the magnitude of a certain activity or function of the molecule compared to the magnitude of the activity or function observed in the absence of the agonist. Particular agonists of interest may include, but are not limited to, polypeptides, nucleic acids, carbohydrates, or any other molecules that bind to the antigen.

[0168] The term “antagonist” or “inhibitor”, refer to a modulator that, when contacted with a molecule of interest causes a decrease in the magnitude of a certain activity or function of the molecule compared to the magnitude of the activity or function observed in the absence of the antagonist. Particular antagonists of interest include those that block or modulate the biological or immunological activity of the antigen. Antagonists and inhibitors of antigens may include, but are not limited to, proteins, nucleic acids, carbohydrates, or any other molecules, which bind to the antigen.

[0169] As used herein, the term “effective amount” refers to the amount of a therapy which is sufficient to reduce or ameliorate the severity and/or duration of a disorder or one or more symptoms thereof, prevent the advancement of a disorder, cause regression of a disorder, prevent the recurrence, development, onset or progression of one or more symptoms associated with a disorder, detect a disorder, or enhance or improve the prophylactic or therapeutic effect(s) of another therapy (e.g., prophylactic or therapeutic agent).

[0170] The term “sample”, as used herein, is used in its broadest sense. A “biological sample”, as used herein, includes, but is not limited to, any quantity of a substance from a living thing or formerly living thing. Such living things include, but are not limited to, humans, mice, rats, monkeys, dogs, rabbits and other animals. Such substances include, but are not limited to, blood, serum, urine, synovial fluid, cells, organs, tissues, bone marrow, lymph nodes and spleen.

### I. Generation of DVD Binding Protein

[0171] The invention pertains to Dual Variable Domain binding proteins capable of binding one or more targets and methods of making the same. In an embodiment, the binding protein comprises a polypeptide chain, wherein said polypeptide chain comprises VD1-(X1)n-VD2-C-(X2)n, wherein VD1 is a first variable domain, VD2 is a second variable domain, C is a constant domain, X1 represents an amino acid or polypeptide, X2 represents an Fc region and n is 0 or 1. The binding protein of the invention can be generated using various techniques. The invention provides expression vectors, host cell and methods of generating the binding protein.

a. Generation of Parent Monoclonal Antibodies

[0172] The variable domains of the DVD binding protein can be obtained from parent antibodies, including polyclonal and mAbs capable of binding antigens of interest. These antibodies may be naturally occurring or may be generated by recombinant technology.

[0173] MAbs can be prepared using a wide variety of techniques known in the art including the use of hybridoma, recombinant, and phage display technologies, or a combination thereof. For example, mAbs can be produced using hybridoma techniques including those known in the art and taught, for example, in Harlow et al., Antibodies: A Laboratory Manual, (Cold Spring Harbor Laboratory Press, 2nd ed. 1988); Hammerling, et al., in: Monoclonal Antibodies and T-Cell Hybridomas 563-681 (Elsevier, N.Y., 1981) (said references incorporated by reference in their entireties). The term “monoclonal antibody” as used herein is not limited to antibodies produced through hybridoma technology. The term “monoclonal antibody” refers to an antibody that is derived from a single clone, including any eukaryotic, prokaryotic, or phage clone, and not the method by which it is produced. Hybridomas are selected, cloned and further screened for desirable characteristics, including robust hybridoma growth, high antibody production and desirable antibody characteristics, as discussed in Example 1 below. Hybridomas may be cultured and expanded in vivo in syngeneic animals, in animals that lack an immune system, e.g., nude mice, or in cell culture in vitro. Methods of selecting, cloning and expanding hybridomas are well known to those of ordinary skill in the art. In a particular embodiment, the hybridomas are mouse hybridomas. In another embodiment, the hybridomas are produced in a non-human, non-mouse species such as rats, sheep, pigs, goats, cattle or horses. In another embodiment, the hybridomas are human hybridomas, in which a human non-secretory myeloma is fused with a human cell expressing an antibody capable of binding a specific antigen.

[0174] Recombinant mAbs are also generated from single, isolated lymphocytes using a procedure referred to in the art as the selected lymphocyte antibody method (SLAM), as described in U.S. Pat. No. 5,627,052, PCT Publication WO 92/02551 and Babcock, J. S. et al. (1996) Proc. Natl. Acad. Sci. USA 93:7843-7848. In this method, single cells secreting antibodies of interest, e.g., lymphocytes derived from an immunized animal, are identified, and, heavy- and light-chain variable region cDNAs are rescued from the cells by reverse transcriptase-PCR and these variable regions can then be expressed, in the context of appropriate immunoglobulin constant regions (e.g., human constant regions), in mammalian host cells, such as COS or CHO cells. The host cells transfected with the amplified immunoglobulin sequences, derived from in vivo selected lymphocytes, can then undergo further analysis and selection in vitro, for example by panning the transfected cells to isolate cells expressing antibodies to the antigen of interest. The amplified immunoglobulin sequences further can be manipulated in vitro, such as by in vitro affinity maturation methods such as those described in PCT Publication WO 97/29131 and PCT Publication WO 00/56772.

[0175] Monoclonal antibodies are also produced by immunizing a non-human animal comprising some, or all, of the human immunoglobulin locus with an antigen of interest. In an embodiment, the non-human animal is a XENOMOUSE transgenic mouse, an engineered mouse strain that comprises large fragments of the human immunoglobulin loci and is deficient in mouse antibody production. See, e.g., Green et al. Nature Genetics 7:13-21 (1994) and U.S. Pat. Nos. 5,916,771, 5,939,598, 5,985,615, 5,998,209, 6,075,181, 6,091,001, 6,114,598 and 6,130,364. See also WO 91/10741, published Jul. 25, 1991, WO 94/02602, published Feb. 3, 1994, WO 96/34096 and WO 96/33735, both published Oct. 31, 1996, WO 98/16654, published Apr. 23, 1998, WO 98/24893, published Jun. 11, 1998, WO 98/50433, published Nov. 12, 1998, WO 99/45031, published Sep. 10, 1999, WO 99/53049, published Oct. 21, 1999, WO 00 09560, published Feb. 24, 2000 and WO 00/037504, published Jun. 29, 2000. The XENOMOUSE transgenic mouse produces an adult-like human repertoire of fully human antibodies, and generates antigen-specific human monoclonal antibodies. The XENOMOUSE transgenic mouse contains approximately 80% of the human antibody repertoire through introduction of megabase sized, germline configuration YAC fragments of the human heavy chain loci and x light chain loci. See Mendez et al., Nature Genetics 15:146-156 (1997), Green and Jakobovits J. Exp. Med. 188:483-495 (1998), the disclosures of which are hereby incorporated by reference.

[0176] In vitro methods also can be used to make the parent antibodies, wherein an antibody library is screened to identify an antibody having the desired binding specificity. Methods for such screening of recombinant antibody libraries are well known in the art and include methods described in, for example, Ladner et al. U.S. Pat. No. 5,223,409; Kang et al. PCT Publication No. WO 92/18619; Dower et al. PCT Publication No. WO 91/17271; Winter et al. PCT Publication No. WO 92/20791; Markland et al. PCT Publication No. WO 92/15679; Breitling et al. PCT Publication No. WO 93/01288; McCafferty et al. PCT Publication No. WO 92/01047; Garrard et al. PCT Publication No. WO 92/09690; Fuchs et al. (1991) Bio/Technology 9:1370-1372; Hay et al. (1992) Hum Antibod Hybridomas 3:81-85; Huse et al. (1989) Science 246:1275-1281; McCafferty et al., Nature (1990) 348:552-554; Griffiths et al. (1993) EMBO J 12:725-734; Hawkins et al. (1992) J Mol Biol 226:889-896; Clackson et al. (1991) Nature 352:624-628; Gram et al. (1992) PNAS 89:3576-3580; Garrad et al. (1991) Bio/Technology 9:1373-1377; Hoogenboom et al. (1991) Nuc Acid Res 19:4133-4137; and Barbas et al. (1991) PNAS 88:7978-7982, US patent application publication 20030186374, and PCT Publication No. WO 97/29131, the contents of each of which are incorporated herein by reference.

[0177] Parent antibodies of the present invention can also be generated using various phage display methods known in the art. In phage display methods, functional antibody domains are displayed on the surface of phage particles which carry the polynucleotide sequences encoding them. In a particular, such phage can be utilized to display antigen-binding domains expressed from a repertoire or combinatorial antibody library (e.g., human or murine). Phage expressing an antigen binding domain that binds the antigen of interest can be selected or identified with antigen, e.g., using labeled antigen or antigen bound or captured to a solid surface or bead. Phage used in these methods are typically filamentous phage including fd and M13 binding domains expressed from phage with Fab, Fv or disulfide stabilized Fv antibody domains recombinantly fused to either the phage gene III or gene VIII protein. Examples of phage display methods that can be used to make the antibodies of the present invention include those disclosed in Brinkman et al., J. Immunol. Methods 182:41-50 (1995); Ames et al., J. Immunol. Methods 184:177-186 (1995); Kettleborough et al., Eur. J. Immunol. 24:952-958 (1994); Persic et al., Gene 187 9-18 (1997); Burton et al., Advances in Immunology 57:191-280 (1994); PCT application No. PCT/GB91/01134; PCT publications WO 90/02809; WO 91/10737; WO 92/01047; WO 92/18619; WO 93/11236; WO 95/15982; WO 95/20401; and U.S. Pat. Nos. 5,698,426; 5,223,409; 5,403,484; 5,580,717; 5,427,908; 5,750,753; 5,821,047; 5,571,698; 5,427,908; 5,516,637; 5,780, 225; 5,658,727; 5,733,743 and 5,969,108; each of which is incorporated herein by reference in its entirety.

[0178] As described in the herein references, after phage selection, the antibody coding regions from the phage can be isolated and used to generate whole antibodies including human antibodies or any other desired antigen binding fragment, and expressed in any desired host, including mammalian cells, insect cells, plant cells, yeast, and bacteria, e.g., as described in detail below. For example, techniques to recombinantly produce Fab, Fab′ and F(ab′)2 fragments can also be employed using methods known in the art such as those disclosed in PCT publication WO 92/22324; Mullinax et al., BioTechniques 12(6):864-869 (1992); and Sawai et al., AJRI 34:26-34 (1995); and Better et al., Science 240:1041-1043 (1988) (said references incorporated by reference in their entireties). Examples of techniques which can be used to produce single-chain Fvs and antibodies include those described in U.S. Pat. Nos. 4,946,778 and 5,258,498; Huston et al., Methods in Enzymology 203:46-88 (1991); Shu et al., PNAS 90:7995-7999 (1993); and Skerra et al., Science 240:1038-1040 (1988).

[0179] Alternative to screening of recombinant antibody libraries by phage display, other methodologies known in the art for screening large combinatorial libraries can be applied to the identification of parent antibodies. One type of alternative expression system is one in which the recombinant antibody library is expressed as RNA-protein fusions, as described in PCT Publication No. WO 98/31700 by Szostak and Roberts, and in Roberts, R. W. and Szostak, J. W. (1997) Proc. Natl. Acad. Sci. USA 94:12297-12302. In this system, a covalent fusion is created between an mRNA and the peptide or protein that it encodes by in vitro translation of synthetic mRNAs that carry puromycin, a peptidyl acceptor antibiotic, at their 3′ end. Thus, a specific mRNA can be enriched from a complex mixture of mRNAs (e.g., a combinatorial library) based on the properties of the encoded peptide or protein, e.g., antibody, or portion thereof, such as binding of the antibody, or portion thereof, to the dual specificity antigen. Nucleic acid sequences encoding antibodies, or portions thereof, recovered from screening of such libraries can be expressed by recombinant means as described herein (e.g., in mammalian host cells) and, moreover, can be subjected to further affinity maturation by either additional rounds of screening of mRNA-peptide fusions in which mutations have been introduced into the originally selected sequence(s), or by other methods for affinity maturation in vitro of recombinant antibodies, as described herein.

[0180] In another approach the parent antibodies can also be generated using yeast display methods known in the art. In yeast display methods, genetic methods are used to tether antibody domains to the yeast cell wall and display them on the surface of yeast. In particular, such yeast can be utilized to display antigen-binding domains expressed from a repertoire or combinatorial antibody library (e.g., human or murine). Examples of yeast display methods that can be used to make the parent antibodies include those disclosed in Wittrup, et al. U.S. Pat. No. 6,699,658 incorporated herein by reference.

[0181] The antibodies described herein can be further modified to generate CDR grafted and humanized parent antibodies. CDR-grafted parent antibodies comprise heavy and light chain variable region sequences from a human antibody wherein one or more of the CDR regions of V_{H} and/or V_{L} are replaced with CDR sequences of murine antibodies capable of binding antigen of interest. A framework sequence from any human antibody may serve as the template for CDR grafting. However, straight chain replacement onto such a framework often leads to some loss of binding affinity to the antigen. The more homologous a human antibody is to the original murine antibody, the less likely the possibility that combining the murine CDRs with the human framework will introduce distortions in the CDRs that could reduce affinity. Therefore, in an embodiment, the human variable framework that is chosen to replace the murine variable framework apart from the CDRs have at least a 65% sequence identity with the murine antibody variable region framework. In an embodiment, the human and murine variable regions apart from the CDRs have at least 70% sequence identify. In a particular embodiment, that the human and murine variable regions apart from the CDRs have at least 75% sequence identity. In another embodiment, the human and murine variable regions apart from the CDRs have at least 80% sequence identity. Methods for producing such antibodies are known in the art (see EP 239,400; PCT publication WO 91/09967; U.S. Pat. Nos. 5,225,539; 5,530,101; and 5,585,089), veneering or resurfacing (EP 592,106; EP 519,596; Padlan, Molecular Immunology 28(4/5):489-498 (1991); Studnicka et al., Protein Engineering 7(6):805-814 (1994); Roguska et al., PNAS 91:969-973 (1994)), and chain shuffling (U.S. Pat. No. 5,565,352); and anti-idiotypic antibodies.

[0182] Humanized antibodies are antibody molecules from non-human species antibody that binds the desired antigen having one or more complementarity determining regions (CDRs) from the non-human species and framework regions from a human immunoglobulin molecule. Known human Ig sequences are disclosed, e.g., www.ncbi.nlm.nih.gov/entrez-/query.fcgi; www.atcc.org/phage/hdb.html; www.sciquest.com/; www.abcam.com/; www.antibodyresource.com/onlinecomp.html; www.public.iastate.edu/.about.pedro/research_tools.html; www.mgen.uni-heidelberg.de/SD/IT/IT.html; www.whfreeman.com/immunology/CH-05/kuby05.htm; www.library.thinkquest.org/12429/Immune/Antibody.html; www.hhmi.org/grants/lectures/1996/vlab/; www.path.cam.ac.uk/.about.mrc7/m-ikeimages.html; www.antibodyresource.com/; mcb.harvard.edu/BioLinks/Immunology.html.www.immunologylink.com/; pathbox.wustl.edu/.about.hcenter/index.-html; www.biotech.ufl.edu/.about.hcl/; www.pebio.com/pa/340913/340913.html-; www.nal.usda.gov/awic/pubs/antibody/; www.m.ehime-u.acjp/.about.yasuhito-/Elisa.html; www.biodesign.com/table.asp; www.icnet.uk/axp/facs/davies/lin-ks.html; www.biotech.ufl.edu/.about.fccl/protocol.html; www.isac-net.org/sites_geo.html; aximtl.imt.uni-marburg.de/.about.rek/AEP—Start.html; baserv.uci.kun.nl/.about.jraats/linksl.html; www.recab.uni-hd.de/immuno.bme.nwu.edu/; www.mrc-cpe.cam.ac.uk/imt-doc/public/INTRO.html; www.ibt.unam.mx/virNmice.html; imgt.cnusc.fr:8104/; www.biochem.ucl.ac.uk/.about.martin/abs/index.html; antibody.bath.ac.uk/; abgen.cvm.tamu.edu/lab/wwwabgen.html; www.unizh.ch/.about.honegger/AHOseminar/Slide01.html; www.cryst.bbk.ac.uk/.about.ubcg07s/; www.nimr.mrc.ac.uk/CC/ccaewg/ccaewg.htm; www.path.cam.ac.uk/.about.mrc7/h-umanisation/TAHHP.html; www.ibt.unam.mx/vir/structure/stataim.html; www.biosci.missouri.edu/smithgp/index.html; www.cryst.bioc.cam.ac.uk/.abo-ut.fmolina/Web-pages/Pept/spottech.html; www.jerini.de/fr roducts.htm; www.patents.ibm.com/ibm.html.Kabat et al., Sequences of Proteins of Immunological Interest, U.S. Dept. Health (1983), each entirely incorporated herein by reference. Such imported sequences can be used to reduce immunogenicity or reduce, enhance or modify binding, affinity, on-rate, off-rate, avidity, specificity, half-life, or any other suitable characteristic, as known in the art.

[0183] Framework residues in the human framework regions may be substituted with the corresponding residue from the CDR donor antibody to alter, e.g., improve, antigen binding. These framework substitutions are identified by methods well known in the art, e.g., by modeling of the interactions of the CDR and framework residues to identify framework residues important for antigen binding and sequence comparison to identify unusual framework residues at particular positions. (See, e.g., Queen et al., U.S. Pat. No. 5,585,089; Riechmann et al., Nature 332:323 (1988), which are incorporated herein by reference in their entireties.) Three-dimensional immunoglobulin models are commonly available and are familiar to those skilled in the art. Computer programs are available which illustrate and display probable three-dimensional conformational structures of selected candidate immunoglobulin sequences. Inspection of these displays permits analysis of the likely role of the residues in the functioning of the candidate immunoglobulin sequence, i.e., the analysis of residues that influence the ability of the candidate immunoglobulin to bind its antigen. In this way, FR residues can be selected and combined from the consensus and import sequences so that the desired antibody characteristic, such as increased affinity for the target antigen(s), is achieved. In general, the CDR residues are directly and most substantially involved in influencing antigen binding. Antibodies can be humanized using a variety of techniques known in the art, such as but not limited to those described in Jones et al., Nature 321:522 (1986); Verhoeyen et al., Science 239:1534 (1988)), Sims et al., J. Immunol. 151: 2296 (1993); Chothia and Lesk, J. Mol. Biol. 196:901 (1987), Carter et al., Proc. Natl. Acad. Sci. U.S.A. 89:4285 (1992); Presta et al., J. Immunol. 151:2623 (1993), Padlan, Molecular Immunology 28(4/5):489-498 (1991); Studnicka et al., Protein Engineering 7(6):805-814 (1994); Roguska. et al., PNAS 91:969-973 (1994); PCT publication WO 91/09967, PCT/: US98/16280, US96/18978, US91/09630, US91/05939, US94/01234, GB89/01334, GB91/01134, GB92/01755; WO90/14443, WO90/14424, WO90/14430, EP 229246, EP 592,106; EP 519,596, EP 239,400, U.S. Pat. Nos. 5,565,332, 5,723,323, 5,976,862, 5,824,514, 5,817,483, 5,814,476, 5,763,192, 5,723,323, 5,766886, 5,714,352, 6,204,023, 6,180,370, 5,693,762, 5,530,101, 5,585,089, 5,225,539; 4,816,567, each entirely incorporated herein by reference, included references cited therein.

### B. Criteria for Selecting Parent Monoclonal Antibodies

[0184] An embodiment of the invention pertains to selecting parent antibodies with at least one or more properties desired in the DVD-Ig molecule. In an embodiment, the desired property is selected from one or more antibody parameters. In another embodiment, the antibody parameters are selected from the group consisting of antigen specificity, affinity to antigen, potency, biological function, epitope recognition, stability, solubility, production efficiency, immunogenicity, pharmacokinetics, bioavailability, tissue cross reactivity, and orthologous antigen binding.

### B1. Affinity to Antigen

[0185] The desired affinity of a therapeutic mAb may depend upon the nature of the antigen, and the desired therapeutic end-point. In an embodiment, monoclonal antibodies have higher affinities (Kd=0.01-0.50 μM) when blocking a cytokine-cytokine receptor interaction as such interaction are usually high affinity interactions (e.g., <pM-<nM ranges). In such instances, the mAb affinity for its target should be equal to or better than the affinity of the cytokine (ligand) for its receptor. On the other hand, mAb with lesser affinity (>nM range) could be therapeutically effective e.g., in clearing circulating potentially pathogenic proteins e.g., monoclonal antibodies that bind to, sequester, and clear circulating species of A-β amyloid. In other instances, reducing the affinity of an existing high affinity mAb by site-directed mutagenesis or using a mAb with lower affinity for its target could be used to avoid potential side-effects e.g., a high affinity mAb may sequester/neutralize all of its intended target, thereby completely depleting/eliminating the function(s) of the targeted protein. In this scenario, a low affinity mAb may sequester/neutralize a fraction of the target that may be responsible for the disease symptoms (the pathological or over-produced levels), thus allowing a fraction of the target to continue to perform its normal physiological function(s). Therefore, it may be possible to reduce the Kd to adjust dose and/or reduce side-effects. The affinity of the parental mAb might play a role in appropriately targeting cell surface molecules to achieve desired therapeutic out-come. For example, if a target is expressed on cancer cells with high density and on normal cells with low density, a lower affinity mAb will bind a greater number of targets on tumor cells than normal cells, resulting in tumor cell elimination via ADCC or CDC, and therefore might have therapeutically desirable effects. Thus selecting a mAb with desired affinity may be relevant for both soluble and surface targets.

[0186] Signaling through a receptor upon interaction with its ligand may depend upon the affinity of the receptor-ligand interaction. Similarly, it is conceivable that the affinity of a mAb for a surface receptor could determine the nature of intracellular signaling and whether the mAb may deliver an agonist or an antagonist signal. The affinity-based nature of mAb-mediated signaling may have an impact of its side-effect profile. Therefore, the desired affinity and desired functions of therapeutic monoclonal antibodies need to be determined carefully by in vitro and in vivo experimentation.

[0187] The desired Kd of a binding protein (e.g., an antibody) may be determined experimentally depending on the desired therapeutic outcome. In an embodiment parent antibodies with affinity (Kd) for a particular antigen equal to, or better than, the desired affinity of the DVD-Ig for the same antigen are selected. The antigen binding affinity and kinetics are assessed by Biacore or another similar technique. In one embodiment, each parent antibody has a dissociation constant (Kd) to its antigen selected from the group consisting of: at most about 10⁻⁷ M; at most about 10⁻⁸ M; at most about 10⁻⁹ M; at most about 10⁻¹⁰ M; m at most about 10⁻¹¹ M; at most about 10⁻¹² M; and at most 10⁻¹³ M. First parent antibody from which VD1 is obtained and second parent antibody from which VD2 is obtained may have similar or different affinity (K_{D}) for the respective antigen. Each parent antibody has an on rate constant (Kon) to the antigen selected from the group consisting of: at least about 10² M⁻¹s⁻¹; at least about 10³ M⁻¹s⁻¹; at least about 10⁴ M⁻¹s⁻¹; at least about 10⁵ M⁻¹s⁻¹; and at least about 10⁶ M⁻¹s⁻¹, as measured by surface plasmon resonance. The first parent antibody from which VD1 is obtained and the second parent antibody from which VD2 is obtained may have similar or different on rate constant (Kon) for the respective antigen. In one embodiment, each parent antibody has an off rate constant (Koff) to the antigen selected from the group consisting of: at most about 10⁻³ s⁻¹; at most about 10⁻⁴ s⁻¹; at most about 10⁻⁵ s⁻¹; and at most about 10⁻⁶ s⁻¹, as measured by surface plasmon resonance. The first parent antibody from which VD1 is obtained and the second parent antibody from which VD2 is obtained may have similar or different off rate constants (Koff) for the respective antigen.

### B2. Potency

[0188] The desired affinity/potency of parental monoclonal antibodies will depend on the desired therapeutic outcome. For example, for receptor-ligand (R-L) interactions the affinity (kd) is equal to or better than the R-L kd (pM range). For simple clearance of a pathologic circulating protein, the kd could be in low nM range e.g., clearance of various species of circulating A-β peptide. In addition, the kd will also depend on whether the target expresses multiple copies of the same epitope e.g a mAb targeting conformational epitope in Aβ oligomers.

[0189] Where VD1 and VD2 bind the same antigen, but distant epitopes, the DVD-Ig will contain 4 binding sites for the same antigen, thus increasing avidity and thereby the apparent kd of the DVD-Ig. In an embodiment, parent antibodies with equal or lower kd than that desired in the DVD-Ig are chosen. The affinity considerations of a parental mAb may also depend upon whether the DVD-Ig contains four or more identical antigen binding sites (i.e; a DVD-Ig from a single mAb). In this case, the apparent kd would be greater than the mAb due to avidity. Such DVD-Igs can be employed for cross-linking surface receptor, increase neutralization potency, enhance clearance of pathological proteins etc.

[0190] In an embodiment parent antibodies with neutralization potency for specific antigen equal to or better than the desired neutralization potential of the DVD-Ig for the same antigen are selected. The neutralization potency can be assessed by a target-dependent bioassay where cells of appropriate type produce a measurable signal (i.e. proliferation or cytokine production) in response to target stimulation, and target neutralization by the mAb can reduce the signal in a dose-dependent manner.

### B3. Biological Functions

[0191] Monoclonal antibodies can perform potentially several functions. Some of these functions are listed in Table 1. These functions can be assessed by both in vitro assays (e.g., cell-based and biochemical assays) and in vivo animal models.

TABLE 1
Some Potential Applications For Therapeutic Antibodies

| Target (Class) | Mechanism of Action (target) |
|---|---|
| Soluble | Neutralization of activity (e.g., a cytokine) |
| (cytokines, other) | Enhance clearance (e.g., Aβ oligomers) |
| | Increase half-life (e.g., GLP 1) |
| Cell Surface | Agonist (e.g., GLP1 R; EPO R; etc.) |
| (Receptors, other) | Antagonist (e.g., integrins; etc.) |
| | Cytotoxic (CD 20; etc.) |
| Protein deposits | Enhance clearance/degradation (e.g., Aβ |
| | plaques, amyloid deposits) |

[0192] MAbs with distinct functions described in the examples herein in Table 1 can be selected to achieve desired therapeutic outcomes. Two or more selected parent monoclonal antibodies can then be used in DVD-Ig format to achieve two distinct functions in a single DVD-Ig molecule. For example, a DVD-Ig can be generated by selecting a parent mAb that neutralizes function of a specific cytokine, and selecting a parent mAb that enhances clearance of a pathological protein. Similarly, we can select two parent monoclonal antibodies that recognize two different cell surface receptors, one mAb with an agonist function on one receptor and the other mAb with an antagonist function on a different receptor. These two selected monoclonal antibodies each with a distinct function can be used to construct a single DVD-Ig molecule that will possess the two distinct functions (agonist and antagonist) of the selected monoclonal antibodies in a single molecule. Similarly, two antagonistic monoclonal antibodies to cell surface receptors each blocking binding of respective receptor ligands (e.g., EGF and IGF) can be used in a DVD-Ig format. Conversely, an antagonistic anti-receptor mAb (e.g., anti-EGFR) and a neutralizing anti-soluble mediator (e.g., anti-IGF1/2) mAb can be selected to make a DVD-Ig.

[0193] B4. Epitope Recognition:

[0194] Different regions of proteins may perform different functions. For example specific regions of a cytokine interact with the cytokine receptor to bring about receptor activation whereas other regions of the protein may be required for stabilizing the cytokine. In this instance one may select a mAb that binds specifically to the receptor interacting region(s) on the cytokine and thereby block cytokine-receptor interaction. In some cases, for example certain chemokine receptors that bind multiple ligands, a mAb that binds to the epitope (region on chemokine receptor) that interacts with only one ligand can be selected. In other instances, monoclonal antibodies can bind to epitopes on a target that are not directly responsible for physiological functions of the protein, but binding of a mAb to these regions could either interfere with physiological functions (steric hindrance) or alter the conformation of the protein such that the protein cannot function (mAb to receptors with multiple ligand which alter the receptor conformation such that none of the ligand can bind). Anti-cytokine monoclonal antibodies that do not block binding of the cytokine to its receptor, but block signal transduction have also been identified (e.g., 125-2H, an anti-IL-18 mAb).

[0195] Examples of epitopes and mAb functions include, but are not limited to, blocking Receptor-Ligand (R-L) interaction (neutralizing mAb that binds R-interacting site); steric hindrance resulting in diminished or no R-binding. An Ab can bind the target at a site other than a receptor binding site, but still interferes with receptor binding and functions of the target by inducing conformational change and eliminate function (e.g., Xolair), binding to R but block signaling (125-2H).

[0196] In an embodiment, the parental mAb needs to target the appropriate epitope for maximum efficacy. Such epitope should be conserved in the DVD-Ig. The binding epitope of a mAb can be determined by several approaches, including co-crystallography, limited proteolysis of mAb-antigen complex plus mass spectrometric peptide mapping (Legros V. et al 2000 Protein Sci. 9:1002-10), phage displayed peptide libraries (O'Connor K H et al 2005 J Immunol Methods. 299:21-35), as well as mutagenesis (Wu C. et al. 2003 J Immunol 170:5571-7).

### B5. Physicochemical and Pharmaceutical Properties:

[0197] Therapeutic treatment with antibodies often requires administration of high doses, often several mg/kg (due to a low potency on a mass basis as a consequence of a typically large molecular weight). In order to accommodate patient compliance and to adequately address chronic disease therapies and outpatient treatment, subcutaneous (s.c.) or intramuscular (i.m.) administration of therapeutic mAbs is desirable. For example, the maximum desirable volume for s.c. administration is ˜1.0 mL, and therefore, concentrations of >100 mg/mL are desirable to limit the number of injections per dose. In an embodiment, the therapeutic antibody is administered in one dose. The development of such formulations is constrained, however, by protein-protein interactions (e.g., aggregation, which potentially increases immunogenicity risks) and by limitations during processing and delivery (e.g., viscosity). Consequently, the large quantities required for clinical efficacy and the associated development constraints limit full exploitation of the potential of antibody formulation and s.c. administration in high-dose regimens. It is apparent that the physicochemical and pharmaceutical properties of a protein molecule and the protein solution are of utmost importance, e.g., stability, solubility and viscosity features.

### B5.1. Stability:

[0198] A “stable” antibody formulation is one in which the antibody therein essentially retains its physical stability and/or chemical stability and/or biological activity upon storage. Stability can be measured at a selected temperature for a selected time period. In an embodiment, the antibody in the formulation is stable at room temperature (about 30° C.) or at 40° C. for at least 1 month and/or stable at about 2-8° C. for at least 1 year for at least 2 years. Furthermore, in an embodiment, the formulation is stable following freezing (to, e.g., −70° C.) and thawing of the formulation, hereinafter referred to as a “freeze/thaw cycle.” In another example, a “stable” formulation may be one wherein less than about 10% and less than about 5% of the protein is present as an aggregate in the formulation.

[0199] A DVD-Ig stable in vitro at various temperatures for an extended time period is desirable. One can achieve this by rapid screening of parental mAbs stable in vitro at elevated temperature, e.g., at 40° C. for 2-4 weeks, and then assess stability. During storage at 2-8° C., the protein reveals stability for at least 12 months, e.g., at least 24 months. Stability (% of monomeric, intact molecule) can be assessed using various techniques such as cation exchange chromatography, size exclusion chromatography, SDS-PAGE, as well as bioactivity testing. For a more comprehensive list of analytical techniques that may be employed to analyze covalent and conformational modifications please see Jones, A. J. S. (1993) Analytical methods for the assessment of protein formulations and delivery systems. In: Cleland, J. L.; Langer, R., editors. Formulation and delivery of peptides and proteins, 1^{St} edition, Washington, ACS, pg. 22-45; and Pearlman, R.; Nguyen, T. H. (1990) Analysis of protein drugs. In: Lee, V. H., editor. Peptide and protein drug delivery, 1st edition, New York, Marcel Dekker, Inc., pg. 247-301.

[0200] Heterogeneity and aggregate formation: stability of the antibody may be such that the formulation may reveal less than about 10%, and, in an embodiment, less than about 5%, in another embodiment, less than about 2%, or, in an embodiment, within the range of 0.5% to 1.5% or less in the GMP antibody material that is present as aggregate. Size exclusion chromatography is a method that is sensitive, reproducible, and very robust in the detection of protein aggregates.

[0201] In addition to low aggregate levels, the antibody must, in an embodiment, be chemically stable. Chemical stability may be determined by ion exchange chromatography (e.g., cation or anion exchange chromatography), hydrophobic interaction chromatography, or other methods such as isoelectric focusing or capillary electrophoresis. For instance, chemical stability of the antibody may be such that after storage of at least 12 months at 2-8° C. the peak representing unmodified antibody in a cation exchange chromatography may increase not more than 20%, in an embodiment, not more than 10%, or, in another embodiment, not more than 5% as compared to the antibody solution prior to storage testing.

[0202] In an embodiment, the parent antibodies display structural integrity; correct disulfide bond formation, and correct folding: Chemical instability due to changes in secondary or tertiary structure of an antibody may impact antibody activity. For instance, stability as indicated by activity of the antibody may be such that after storage of at least 12 months at 2-8° C. the activity of the antibody may decrease not more than 50%, in an embodiment not more than 30%, or even not more than 10%, or in an embodiment not more than 5% or 1% as compared to the antibody solution prior to storage testing. Suitable antigen-binding assays can be employed to determine antibody activity.

### B5.2. Solubility:

[0203] The “solubility” of a mAb correlates with the production of correctly folded, monomeric IgG. The solubility of the IgG may therefore be assessed by HPLC. For example, soluble (monomeric) IgG will give rise to a single peak on the HPLC chromatograph, whereas insoluble (e.g., multimeric and aggregated) will give rise to a plurality of peaks. A person skilled in the art will therefore be able to detect an increase or decrease in solubility of an IgG using routine HPLC techniques. For a more comprehensive list of analytical techniques that may be employed to analyze solubility (see Jones, A. G. Dep. Chem. Biochem. Eng., Univ. Coll. London, London, UK. Editor(s): Shamlou, P. Ayazi. Process. Solid-Liq. Suspensions (1993), 93-117. Publisher: Butterworth-Heinemann, Oxford, UK and Pearlman, Rodney; Nguyen, Tue H, Advances in Parenteral Sciences (1990), 4 (Pept. Protein Drug Delivery), 247-301). Solubility of a therapeutic mAb is critical for formulating to high concentration often required for adequate dosing. As outlined herein, solubilities of >100 mg/mL may be required to accommodate efficient antibody dosing. For instance, antibody solubility may be not less than about 5 mg/mL in early research phase, in an embodiment not less than about 25 mg/mL in advanced process science stages, or in an embodiment not less than about 100 mg/mL, or in an embodiment not less than about 150 mg/mL. It is obvious to a person skilled in the art that the intrinsic properties of a protein molecule are important the physico-chemical properties of the protein solution, e.g., stability, solubility, viscosity. However, a person skilled in the art will appreciate that a broad variety of excipients exist that may be used as additives to beneficially impact the characteristics of the final protein formulation. These excipients may include: (i) liquid solvents, cosolvents (e.g., alcohols such as ethanol); (ii) buffering agents (e.g., phosphate, acetate, citrate, amino acid buffers); (iii) sugars or sugar alcohols (e.g., sucrose, trehalose, fructose, raffinose, mannitol, sorbitol, dextrans); (iv) surfactants (e.g., polysorbate 20, 40, 60, 80, poloxamers); (v) isotonicity modifiers (e.g., salts such as NaCl, sugars, sugar alcohols); and (vi) others (e.g., preservatives, chelating agents, antioxidants, chelating substances (e.g., EDTA), biodegradable polymers, carrier molecules (e.g., HSA, PEGs)

[0204] Viscosity is a parameter of high importance with regard to antibody manufacture and antibody processing (e.g., diafiltration/ultrafiltration), fill-finish processes (pumping aspects, filtration aspects) and delivery aspects (syringeability, sophisticated device delivery). Low viscosities enable the liquid solution of the antibody having a higher concentration. This enables the same dose may be administered in smaller volumes. Small injection volumes inhere the advantage of lower pain on injection sensations, and the solutions not necessarily have to be isotonic to reduce pain on injection in the patient. The viscosity of the antibody solution may be such that at shear rates of 100 (1/s) antibody solution viscosity is below 200 mPa s, in an embodiment below 125 mPa s, in another embodiment below 70 mPa s, and in yet another embodiment below 25 mPa s or even below 10 mPa s.

### B 5.3. Production Efficiency

[0205] The generation of a DVD-Ig that is efficiently expressed in mammalian cells, such as Chinese hamster ovary cells (CHO), will in an embodiment require two parental monoclonal antibodies which are themselves expressed efficiently in mammalian cells. The production yield from a stable mammalian line (i.e. CHO) should be above 0.5 g/L, in an embodiment above 1 g/L, and in another embodiment in the range of 2-5 g/L or more (Kipriyanov S M, Little M. 1999 Mol. Biotechnol. 12:173-201; Carroll S, Al-Rubeai M. 2004 Expert Opin Biol Ther. 4:1821-9).

[0206] Production of antibodies and Ig fusion proteins in mammalian cells is influenced by several factors. Engineering of the expression vector via incorporation of strong promoters, enhancers and selection markers can maximize transcription of the gene of interest from an integrated vector copy. The identification of vector integration sites that are permissive for high levels of gene transcription can augment protein expression from a vector (Wurm et al, 2004, Nature Biotechnology, 2004, Vol/Iss/Pg. 22/11 (1393-1398)). Furthermore, levels of production are affected by the ratio of antibody heavy and light chains and various steps in the process of protein assembly and secretion (Jiang et al. 2006, Biotechnology Progress, January-February 2006, vol. 22, no. 1, p. 313-8).

### B 6. Immunogenicity

[0207] Administration of a therapeutic mAb may results in certain incidence of an immune response (ie, the formation of endogenous antibodies directed against the therapeutic mAb). Potential elements that might induce immunogenicity should be analyzed during selection of the parental monoclonal antibodies, and steps to reduce such risk can be taken to optimize the parental monoclonal antibodies prior to DVD-Ig construction. Mouse-derived antibodies have been found to be highly immunogenic in patients. The generation of chimeric antibodies comprised of mouse variable and human constant regions presents a logical next step to reduce the immunogenicity of therapeutic antibodies (Morrison and Schlom, 1990). Alternatively, immunogenicity can be reduced by transferring murine CDR sequences into a human antibody framework (reshaping/CDR grafting/humanization), as described for a therapeutic antibody by Riechmann et al., 1988. Another method is referred to as “resurfacing” or “veneering”, starting with the rodent variable light and heavy domains, only surface-accessible framework amino acids are altered to human ones, while the CDR and buried amino acids remain from the parental rodent antibody (Roguska et al., 1996). In another type of humanization, instead of grafting the entire CDRs, one technique grafts only the “specificity-determining regions” (SDRs), defined as the subset of CDR residues that are involved in binding of the antibody to its target (Kashmiri et al., 2005). This necessitates identification of the SDRs either through analysis of available three-dimensional structures of antibody-target complexes or mutational analysis of the antibody CDR residues to determine which interact with the target. Alternatively, fully human antibodies may have reduced immunogenicity compared to murine, chimeric or humanized antibodies.

[0208] Another approach to reduce the immunogenicity of therapeutic antibodies is the elimination of certain specific sequences that are predicted to be immunogenic. In one approach, after a first generation biologic has been tested in humans and found to be unacceptably immunogenic, the B-cell epitopes can be mapped and then altered to avoid immune detection. Another approach uses methods to predict and remove potential T-cell epitopes. Computational methods have been developed to scan and to identify the peptide sequences of biologic therapeutics with the potential to bind to MHC proteins (Desmet et al., 2005). Alternatively a human dendritic cell-based method can be used to identify CD4⁺ T-cell epitopes in potential protein allergens (Stickler et al., 2005; S. L. Morrison and J. Schlom, Important Adv. Oncol. (1990), pp. 3-18; Riechmann, L., Clark, M., Waldmann, H. and Winter, G. “Reshaping human antibodies for therapy.” Nature (1988) 332: 323-327; Roguska-M-A, Pedersen-J-T, Henry-A-H, Searle-S-M, Roja-C-M, Avery-B, Hoffee-M, Cook-S, Lambert-J-M, Blättler-W-A, Rees-A-R, Guild-B-C. A comparison of two murine mAbs humanized by CDR-grafting and variable domain resurfacing. Protein engineering, {Protein-Eng}, 1996, vol. 9, p. 895-904; Kashmiri-Syed-V-S, De-Pascalis-Roberto, Gonzales-Noreen-R, Schlom-Jeffrey. SDR grafting—a new approach to antibody humanization. Methods (San Diego Calif.), {Methods}, May 2005, vol. 36, no. 1, p. 25-34; Desmet-Johan, Meersseman-Geert, Boutonnet-Nathalie, Pletinckx-Jurgen, De-Clercq-Krista, Debulpaep-Maja, Braeckman-Tessa, Lasters-Ignace. Anchor profiles of HLA-specific peptides: analysis by a novel affinity scoring method and experimental validation. Proteins, 2005, vol. 58, p. 53-69; Stickler-M-M, Estell-D-A, Harding-F-A. CD4+ T-cell epitope determination using unexposed human donor peripheral blood mononuclear cells. Journal of immunotherapy 2000, vol. 23, p. 654-60.)

### B 7. In Vivo Efficacy

[0209] To generate a DVD-Ig molecule with desired in vivo efficacy, it is important to generate and select mAbs with similarly desired in vivo efficacy when given in combination. However, in some instances the DVD-Ig may exhibit in vivo efficacy that cannot be achieved with the combination of two separate mAbs. For instance, a DVD-Ig may bring two targets in close proximity leading to an activity that cannot be achieved with the combination of two separate mAbs. Additional desirable biological functions are described herein in section B 3. Parent antibodies with characteristics desirable in the DVD-Ig molecule may be selected based on factors such as pharmacokinetic t 1/2; tissue distribution; soluble versus cell surface targets; and target concentration-soluble/density-surface.

### B 8. In Vivo Tissue Distribution

[0210] To generate a DVD-Ig molecule with desired in vivo tissue distribution, in an embodiment parent mAbs with similar desired in vivo tissue distribution profile must be selected. Alternatively, based on the mechanism of the dual-specific targeting strategy, it may at other times not be required to select parent mAbs with the similarly desired in vivo tissue distribution when given in combination. For instance, in the case of a DVD-Ig in which one binding component targets the DVD-Ig to a specific site thereby bringing the second binding component to the same target site. For example, one binding specificity of a DVD-Ig could target pancreas (islet cells) and the other specificity could bring GLP1 to the pancreas to induce insulin.

### B 9. Isotype:

[0211] To generate a DVD-Ig molecule with desired properties including, but not limited to, Isotype, Effector functions and the circulating half-life, in an embodiment parent mAbs with appropriate Fc-effector functions depending on the therapeutic utility and the desired therapeutic end-point are selected. There are five main heavy-chain classes or isotypes some of which have several sub-types and these determine the effector functions of an antibody molecule. These effector functions reside in the hinge region, CH2 and CH3 domains of the antibody molecule. However, residues in other parts of an antibody molecule may have effects on effector functions as well. The hinge region Fc-effector functions include: (i) antibody-dependent cellular cytotoxicity, (ii) complement (C1q) binding, activation and complement-dependent cytotoxicity (CDC), (iii) phagocytosis/clearance of antigen-antibody complexes, and (iv) cytokine release in some instances. These Fc-effector functions of an antibody molecule are mediated through the interaction of the Fc-region with a set of class-specific cell surface receptors. Antibodies of the IgG1 isotype are most active while IgG2 and IgG4 having minimal or no effector functions. The effector functions of the IgG antibodies are mediated through interactions with three structurally homologous cellular Fc receptor types (and sub-types) (FcgR1, FcgRII and FcgRIII). These effector functions of an IgG1 can be eliminated by mutating specific amino acid residues in the lower hinge region (e.g., L234A, L235A) that are required for FcgR and C1q binding Amino acid residues in the Fc region, in particular the CH2-CH3 domains, also determine the circulating half-life of the antibody molecule. This Fc function is mediated through the binding of the Fc-region to the neonatal Fc receptor (FcRn) which is responsible for recycling of antibody molecules from the acidic lysosomes back to the general circulation.

[0212] Whether a mAb should have an active or an inactive isotype will depend on the desired therapeutic end-point for an antibody. Some examples of usage of isotypes and desired therapeutic outcome are listed below:
[0213] a) If the desired end-point is functional neutralization of a soluble cytokine then an inactive isotype may be used;
[0214] b) If the desired out-come is clearance of a pathological protein an active isotype may be used;
[0215] c) If the desired out-come is clearance of protein aggregates an active isotype may be used;
[0216] d) If the desired outcome is to antagonize a surface receptor an inactive isotype is used (Tysabri, IgG4; OKT3, mutated IgG1);
[0217] e) If the desired outcome is to eliminate target cells an active isotype is used (Herceptin, IgG1 (and with enhanced effector functions); and
[0218] f) If the desired outcome is to clear proteins from circulation without entering the CNS an IgM isotype may be used (e.g., clearing circulating Ab peptide species).
   The Fc effector functions of a parental mAb can be determined by various in vitro methods well known in the art.

[0219] As discussed, the selection of isotype, and thereby the effector functions will depend upon the desired therapeutic end-point. In cases where simple neutralization of a circulating target is desired, for example blocking receptor-ligand interactions, the effector functions may not be required. In such instances isotypes or mutations in the Fc-region of an antibody that eliminate effector functions are desirable. In other instances where elimination of target cells is the therapeutic end-point, for example elimination of tumor cells, isotypes or mutations or de-fucosylation in the Fc-region that enhance effector functions are desirable (Presta G L, Adv. Drug Delivery Rev. 58:640-656, 2006; Satoh M., Iida S., Shitara K. Expert Opinion Biol. Ther. 6:1161-1173, 2006). Similarly, depending up on the therapeutic utility, the circulating half-life of an antibody molecule can be reduced/prolonged by modulating antibody-FcRn interactions by introducing specific mutations in the Fc region (Dall'Acqua W F, Kiener P A, Wu H. J. Biol. Chem. 281:23514-23524, 2006; Petkova S B., Akilesh S., Sproule T J. et al. Internat. Immunol. 18:1759-1769, 2006; Vaccaro C., Bawdon R., Wanjie S et al. PNAS 103:18709-18714, 2007).

[0220] The published information on the various residues that influence the different effector functions of a normal therapeutic mAb may need to be confirmed for DVD-Ig. It may be possible that in a DVD-Ig format additional (different) Fc-region residues, other than those identified for the modulation of monoclonal antibody effector functions, may be important.

[0221] Overall, the decision as to which Fc-effector functions (isotype) will be critical in the final DVD-Ig format will depend up on the disease indication, therapeutic target, desired therapeutic end-point and safety considerations. Listed below are exemplary appropriate heavy chain and light chain constant regions including, but not limited to:
[0222] IgG1—allotype: G1mz
[0223] IgG1 mutant—A234, A235
[0224] IgG2—allotype: G2m(n-)
[0225] Kappa—Km3
[0226] Lambda

[0227] Fc Receptor and C1q Studies:

[0228] The possibility of unwanted antibody-dependent cell-mediated cytotoxicity (ADCC) and complement-dependent cytotoxicity (CDC) by antibody complexing to any overexpressed target on cell membranes can be abrogated by the (for example, L234A, L235A) hinge-region mutations. These substituted amino acids, present in the IgG1 hinge region of mAb, are expected to result in diminished binding of mAb to human Fc receptors (but not FcRn), as FcgR binding is thought to occur within overlapping sites on the IgG1 hinge region. This feature of mAb may lead to an improved safety profile over antibodies containing a wild-type IgG. Binding of mAb to human Fc receptors can be determined by flow cytometry experiments using cell lines (e.g., THP-1, K562) and an engineered CHO cell line that expresses FcgRIIb (or other FcgRs). Compared to IgG1 control monoclonal antibodies, mAb show reduced binding to FcgRI and FcgRIIa whereas binding to FcgRIIb is unaffected. The binding and activation of C1q by antigen/IgG immune complexes triggers the classical complement cascade with consequent inflammatory and/or immunoregulatory responses. The C1q binding site on IgGs has been localized to residues within the IgG hinge region. C1q binding to increasing concentrations of mAb was assessed by C1q ELISA. The results demonstrate that mAb is unable to bind to C1q, as expected when compared to the binding of a wildtype control IgG1. Overall, the L234A, L235A hinge region mutation abolishes binding of mAb to FcgRI, FcgRIIa and C1q but does not impact the interaction of mAb with FcgRIIb. This data suggests that in vivo, mAb with mutant Fc will interact normally with the inhibitory FcgRIIb but will likely fail to interact with the activating FcgRI and FcgRIIa receptors or C1q.

[0229] Human FcRn Binding:

[0230] The neonatal receptor (FcRn) is responsible for transport of IgG across the placenta and to control the catabolic half-life of the IgG molecules. It might be desirable to increase the terminal half-life of an antibody to improve efficacy, to reduce the dose or frequency of administration, or to improve localization to the target. Alternatively, it might be advantageous to do the converse that is, to decrease the terminal half-life of an antibody to reduce whole body exposure or to improve the target-to-non-target binding ratios. Tailoring the interaction between IgG and its salvage receptor, FcRn, offers a way to increase or decrease the terminal half-life of IgG. Proteins in the circulation, including IgG, are taken up in the fluid phase through micropinocytosis by certain cells, such as those of the vascular endothelia. IgG can bind FcRn in endosomes under slightly acidic conditions (pH 6.0-6.5) and can recycle to the cell surface, where it is released under almost neutral conditions (pH 7.0-7.4). Mapping of the Fc-region-binding site on FcRn80, 16, 17 showed that two histidine residues that are conserved across species, His310 and His435, are responsible for the pH dependence of this interaction. Using phage-display technology, a mouse Fc-region mutation that increases binding to FcRn and extends the half-life of mouse IgG was identified (see Victor, G. et al.; Nature Biotechnology (1997), 15(7), 637-640). Fc-region mutations that increase the binding affinity of human IgG for FcRn at pH 6.0, but not at pH 7.4, have also been identified (see Dall'Acqua William F, et al., Journal of Immunology (2002), 169(9), 5171-80). Moreover, in one case, a similar pH-dependent increase in binding (up to 27-fold) was also observed for rhesus FcRn, and this resulted in a twofold increase in serum half-life in rhesus monkeys compared with the parent IgG (see Hinton, Paul R. et al., Journal of Biological Chemistry (2004), 279(8), 6213-6216). These findings indicate that it is feasible to extend the plasma half-life of antibody therapeutics by tailoring the interaction of the Fc region with FcRn. Conversely, Fc-region mutations that attenuate interaction with FcRn can reduce antibody half-life.

### B.10 Pharmacokinetics (PK):

[0231] To generate a DVD-Ig molecule with desired pharmacokinetic profile, in an embodiment parent mAbs with the similarly desired pharmacokinetic profile are selected. One consideration is that immunogenic response to monoclonal antibodies (ie, HAHA, human anti-human antibody response; HACA, human anti-chimeric antibody response) further complicates the pharmacokinetics of these therapeutic agents. In an embodiment, monoclonal antibodies with minimal or no immunogenicity are used for constructing DVD-Ig molecules such that the resulting DVD-Igs will also have minimal or no immunogenicity. Some of the factors that determine the PK of a mAb include, but are not limited to, Intrinsic properties of the mAb (VH amino acid sequence); immunogenicity; FcRn binding and Fc functions.

[0232] The PK profile of selected parental monoclonal antibodies can be easily determined in rodents as the PK profile in rodents correlates well with (or closely predicts) the PK profile of monoclonal antibodies in cynomolgus monkey and humans. The PK profile is determined as described in Example section 1.2.2.3.A.

[0233] After the parental monoclonal antibodies with desired PK characteristics (and other desired functional properties as discussed herein) are selected, the DVD-Ig is constructed. As the DVD-Ig molecules contain two antigen-binding domains from two parental monoclonal antibodies, the PK properties of the DVD-Ig are assessed as well. Therefore, while determining the PK properties of the DVD-Ig, PK assays may be employed that determine the PK profile based on functionality of both antigen-binding domains derived from the 2 parent monoclonal antibodies. The PK profile of a DVD-Ig can be determined as described in Example 1.2.2.3.A. Additional factors that may impact the PK profile of DVD-Ig include the antigen-binding domain (CDR) orientation; Linker size; and Fc/FcRn interactions. PK characteristics of parent antibodies can be evaluated by assessing the following parameters: absorption, distribution, metabolism and excretion.

[0234] Absorption:

[0235] To date, administration of therapeutic monoclonal antibodies is via parenteral routes (e.g., intravenous [IV], subcutaneous [SC], or intramuscular [IM]). Absorption of a mAb into the systemic circulation following either SC or IM administration from the interstitial space is primarily through the lymphatic pathway. Saturable, presystemic, proteolytic degradation may result in variable absolute bioavailability following extravascular administration. Usually, increases in absolute bioavailability with increasing doses of monoclonal antibodies may be observed due to saturated proteolytic capacity at higher doses. The absorption process for a mAb is usually quite slow as the lymph fluid drains slowly into the vascular system, and the duration of absorption may occur over hours to several days. The absolute bioavailability of monoclonal antibodies following SC administration generally ranges from 50% to 100%.

[0236] Distribution:

[0237] Following IV administration, monoclonal antibodies usually follow a biphasic serum (or plasma) concentration-time profile, beginning with a rapid distribution phase, followed by a slow elimination phase. In general, a biexponential pharmacokinetic model best describes this kind of pharmacokinetic profile. The volume of distribution in the central compartment (Vc) for a mAb is usually equal to or slightly larger than the plasma volume (2-3 liters). A distinct biphasic pattern in serum (plasma) concentration versus time profile may not be apparent with other parenteral routes of administration, such as IM or SC, because the distribution phase of the serum (plasma) concentration-time curve is masked by the long absorption portion. Many factors, including physicochemical properties, site-specific and target-oriented receptor mediated uptake, binding capacity of tissue, and mAb dose can influence biodistribution of a mAb. Some of these factors can contribute to nonlinearity in biodistribution for a mAb.

[0238] Metabolism and Excretion:

[0239] Due to the molecular size, intact monoclonal antibodies are not excreted into the urine via kidney. They are primarily inactivated by metabolism (e.g., catabolism). For IgG-based therapeutic monoclonal antibodies, half-lives typically ranges from hours or 1-2 days to over 20 days. The elimination of a mAb can be affected by many factors, including, but not limited to, affinity for the FcRn receptor, immunogenicity of the mAb, the degree of glycosylation of the mAb, the susceptibility for the mAb to proteolysis, and receptor-mediated elimination.

### B.11 Tissue Cross-Reactivity Pattern on Human and Tox Species:

[0240] Identical staining pattern suggests that potential human toxicity can be evaluated in tox species. Tox species are those animal in which unrelated toxicity is studied.

[0241] The individual antibodies are selected to meet two criteria. (1) Tissue staining appropriate for the known expression of the antibody target. (2) Similar staining pattern between human and tox species tissues from the same organ.

[0242] Criterion 1: Immunizations and/or antibody selections typically employ recombinant or synthesized antigens (proteins, carbohydrates or other molecules). Binding to the natural counterpart and counterscreen against unrelated antigens are often part of the screening funnel for therapeutic antibodies. However, screening against a multitude of antigens is often unpractical. Therefore tissue cross-reactivity studies with human tissues from all major organs serve to rule out unwanted binding of the antibody to any unrelated antigens.

[0243] Criterion 2: Comparative tissue cross reactivity studies with human and tox species tissues (cynomolgus monkey, dog, possibly rodents and others, the same 36 or 37 tissues are being tested as in the human study) help to validate the selection of a tox species. In the typical tissue cross-reactivity studies on frozen tissues sections therapeutic antibodies may demonstrate the expected binding to the known antigen and/or to a lesser degree binding to tissues based either on low level interactions (unspecific binding, low level binding to similar antigens, low level charge based interactions etc.). In any case the most relevant toxicology animal species is the one with the highest degree of coincidence of binding to human and animal tissue.

[0244] Tissue cross reactivity studies follow the appropriate regulatory guidelines including EC CPMP Guideline III/5271/94 “Production and quality control of mAbs” and the 1997 US FDA/CBER “Points to Consider in the Manufacture and Testing of Monoclonal Antibody Products for Human Use”. Cryosections (5 μm) of human tissues obtained at autopsy or biopsy were fixed and dried on object glass. The peroxidase staining of tissue sections was performed, using the avidin-biotin system. FDA's Guidance “Points to Consider in the Manufacture and Testing of Monoclonal Antibody Products for Human Use”. Relevant references include Clarke J 2004, Boon L. 2002a, Boon L 2002b, Ryan A 1999.

[0245] Tissue cross reactivity studies are often done in two stages, with the first stage including cryosections of 32 tissues (typically: Adrenal Gland, Gastrointestinal Tract, Prostate, Bladder, Heart, Skeletal Muscle, Blood Cells, Kidney, Skin, Bone Marrow, Liver, Spinal Cord, Breast, Lung, Spleen, Cerebellum, Lymph Node, Testes, Cerebral Cortex, Ovary, Thymus, Colon, Pancreas, Thyroid, Endothelium, Parathyroid, Ureter, Eye, Pituitary, Uterus, Fallopian Tube and Placenta) from one human donor. In the second phase a full cross reactivity study is performed with up to 38 tissues (including adrenal, blood, blood vessel, bone marrow, cerebellum, cerebrum, cervix, esophagus, eye, heart, kidney, large intestine, liver, lung, lymph node, breast mammary gland, ovary, oviduct, pancreas, parathyroid, peripheral nerve, pituitary, placenta, prostate, salivary gland, skin, small intestine, spinal cord, spleen, stomach, striated muscle, testis, thymus, thyroid, tonsil, ureter, urinary bladder, and uterus) from 3 unrelated adults. Studies are done typically at minimally two dose levels.

[0246] The therapeutic antibody (i.e. test article) and isotype matched control antibody may be biotinylated for avidin-biotin complex (ABC) detection; other detection methods may include tertiary antibody detection for a FITC (or otherwise) labeled test article, or precomplexing with a labeled anti-human IgG for an unlabeled test article.

[0247] Briefly, cryosections (about 5 μm) of human tissues obtained at autopsy or biopsy are fixed and dried on object glass. The peroxidase staining of tissue sections is performed, using the avidin-biotin system. First (in case of a precomplexing detection system), the test article is incubated with the secondary biotinylated anti-human IgG and developed into immune complex. The immune complex at the final concentrations of 2 and 10 μg/mL of test article is added onto tissue sections on object glass and then the tissue sections were reacted for 30 minutes with a avidin-biotin-peroxidase kit. Subsequently, DAB (3,3′-diaminobenzidine), a substrate for the peroxidase reaction, was applied for 4 minutes for tissue staining. Antigen-Sepharose beads are used as positive control tissue sections.

[0248] Any specific staining is judged to be either an expected (e.g., consistent with antigen expression) or unexpected reactivity based upon known expression of the target antigen in question. Any staining judged specific is scored for intensity and frequency. Antigen or serum completion or blocking studies can assist further in determining whether observed staining is specific or nonspecific.

[0249] If two selected antibodies are found to meet the selection criteria—appropriate tissue staining, matching staining between human and toxicology animal specific tissue—they can be selected for DVD-Ig generation.

[0250] The tissue cross reactivity study has to be repeated with the final DVD-Ig construct, but while these studies follow the same protocol as outline herein, they are more complex to evaluate because any binding can come from any of the two parent antibodies, and any unexplained binding needs to be confirmed with complex antigen competition studies.

[0251] It is readily apparent that the complex undertaking of tissue crossreactivity studies with a multispecific molecule like a DVD-Ig is greatly simplified if the two parental antibodies are selected for (1) lack of unexpected tissue cross reactivity findings and (2) for appropriate similarity of tissue cross reactivity findings between the corresponding human and toxicology animal species tissues.

### B.12 Specificity and Selectivity:

[0252] To generate a DVD-Ig molecule with desired specificity and selectivity, one needs to generate and select parent mAbs with the similarly desired specificity and selectivity profile.

[0253] Binding studies for specificity and selectivity with a DVD-Ig can be complex due to the four or more binding sites, two each for each antigen. Briefly, binding studies using ELISA, BIAcore. KinExA or other interaction studies with a DVD-Ig need to monitor the binding of one, two or more antigens to the DVD-Ig molecule. While BIAcore technology can resolve the sequential, independent binding of multiple antigens, more traditional methods including ELISA or more modern techniques like KinExA cannot. Therefore careful characterization of each parent antibody is critical. After each individual antibody has been characterized for specificity, confirmation of specificity retention of the individual binding sites in the DVD-Ig molecule is greatly simplified.

[0254] It is readily apparent that the complex undertaking of determining the specificity of a DVD-Ig is greatly simplified if the two parental antibodies are selected for specificity prior to being combined into a DVD-Ig.

[0255] Antigen-antibody interaction studies can take many forms, including many classical protein protein interaction studies, including ELISA (Enzyme linked immunosorbent assay), Mass spectrometry, chemical cross linking, SEC with light scattering, equilibrium dialysis, gel permeation, ultrafiltration, gel chromatography, large-zone analytical SEC, micropreparative ultracentrigugation (sedimentation equilibrium), spectroscopic methods, titration microcalorimetry, sedimentation equilibrium (in analytical ultracentrifuge), sedimentation velocity (in analytical centrifuge), surface plasmon resonance (including BIAcore). Relevant references include “Current Protocols in Protein Science”, John E. Coligan, Ben M. Dunn, David W. Speicher, Paul T, Wingfield (eds.) Volume 3, chapters 19 and 20, published by John Wiley & Sons Inc., and references included therein and “Current Protocols in Immunology”, John E. Coligan, Barbara E. Bierer, David H. Margulies, Ethan M. Shevach, Warren Strober (eds.) published by John Wiley & Sons Inc and relevant references included therein.

[0256] Cytokine Release in Whole Blood: The interaction of mAb with human blood cells can be investigated by a cytokine release assay (Wing, M. G. Therapeutic Immunology (1995), 2(4), 183-190; “Current Protocols in Pharmacology”, S. J. Enna, Michael Williams, John W. Ferkany, Terry Kenakin, Paul Moser, (eds.) published by John Wiley & Sons Inc; Madhusudan, S. Clinical Cancer Research (2004), 10(19), 6528-6534; Cox, J. Methods (2006), 38(4), 274-282; Choi, I. European Journal of Immunology (2001), 31(1), 94-106). Briefly, various concentrations of mAb are incubated with human whole blood for 24 hours. The concentration tested should cover a wide range including final concentrations mimicking typical blood levels in patients (including but not limited to 100 ng/ml-100 μg/ml). Following the incubation, supernatants and cell lysates were analyzed for the presence of IL-1Rα, TNF-α, IL-1b, IL-6 and IL-8. Cytokine concentration profiles generated for mAb were compared to profiles produced by a negative human IgG control and a positive LPS or PHA control. The cytokine profile displayed by mAb from both cell supernatants and cell lysates was comparable to control human IgG. In an embodiment, the monoclonal antibody does not interact with human blood cells to spontaneously release inflammatory cytokines.

[0257] Cytokine release studies for a DVD-Ig are complex due to the four or more binding sites, two each for each antigen. Briefly, cytokine release studies as described herein measure the effect of the whole DVD-Ig molecule on whole blood or other cell systems, but can resolve which portion of the molecule causes cytokine release. Once cytokine release has been detected, the purity of the DVD-Ig preparation has to be ascertained, because some co-purifying cellular components can cause cytokine release on their own. If purity is not the issue, fragmentation of DVD-Ig (including but not limited to removal of Fc portion, separation of binding sites etc.), binding site mutagenesis or other methods may need to be employed to deconvolute any observations. It is readily apparent that this complex undertaking is greatly simplified if the two parental antibodies are selected for lack of cytokine release prior to being combined into a DVD-Ig.

### B.13 Cross Reactivity to Other Species for Toxicological Studies:

[0258] In an embodiment, the individual antibodies selected with sufficient cross-reactivity to appropriate tox species, for example, cynomolgus monkey. Parental antibodies need to bind to orthologous species target (i.e. cynomolgus monkey) and elicit appropriate response (modulation, neutralization, activation). In an embodiment, the cross-reactivity (affinity/potency) to orthologous species target should be within 10-fold of the human target. In practice, the parental antibodies are evaluated for multiple species, including mouse, rat, dog, monkey (and other non-human primates), as well as disease model species (i.e. sheep for asthma model). The acceptable cross-reactivity to tox species from the perantal monoclonal antibodies allows future toxicology studies of DVD-Ig-Ig in the same species. For that reason, the two parental monoclonal antibodies should have acceptable cross-reactivity for a common tox species therefore allowing toxicology studies of DVD-Ig in the same species.

[0259] Parent mAbs may be selected from various mAbs capable of binding specific targets and well known in the art. These include, but are not limited to anti-TNF antibody (U.S. Pat. No. 6,258,562), anti-IL-12 and/or anti-IL-12p40 antibody (U.S. Pat. No. 6,914,128); anti-IL-18 antibody (US 2005/0147610 A1), anti-05, anti-CBL, anti-CD147, anti-gp120, anti-VLA-4, anti-CD11a, anti-CD18, anti-VEGF, anti-CD40L, anti CD-40 (e.g., see WO2007124299) anti-Id, anti-ICAM-1, anti-CXCL13, anti-CD2, anti-EGFR, anti-TGF-beta 2, anti-HGF, anti-cMet, anti DLL-4, anti-NPR1, anti-PLGF, anti-ErbB3, anti-E-selectin, anti-Fact VII, anti-Her2/neu, anti-F gp, anti-CD11/18, anti-CD14, anti-ICAM-3, anti-RON, anti CD-19, anti-CD80 (e.g., see WO2003039486, anti-CD4, anti-CD3, anti-CD23, anti-beta2-integrin, anti-alpha4beta7, anti-CD52, anti-HLA DR, anti-CD22 (e.g., see U.S. Pat. No. 5,789,554), anti-CD20, anti-MIF, anti-CD64 (FcR), anti-TCR alpha beta, anti-CD2, anti-Hep B, anti-CA 125, anti-EpCAM, anti-gp120, anti-CMV, anti-gpIIbIIIa, anti-IgE, anti-CD25, anti-CD33, anti-HLA, anti-IGF1,2, anti-IGFR, anti-IGF1R, anti-RGMa, anti-tetanus toxoid, anti-VNRintegrin, anti-IL-1alpha, anti-IL-1beta, anti-IL-1 receptor, anti-IL-2 receptor, anti-IL-4, anti-IL-4 receptor, anti-IL5, anti-IL-5 receptor, anti-IL-6, anti-IL-8, anti-IL-9, anti-IL-13, anti-IL-13 receptor, anti-IL-17, and anti-IL-23 (see Presta LG. 2005 Selection, design, and engineering of therapeutic antibodies J Allergy Clin Immunol. 116:731-6 and http://www.path.cam.ac.uk/˜mrc7/humanisation/antibodies.html).

[0260] Parent mAbs may also be selected from various therapeutic antibodies approved for use, in clinical trials, or in development for clinical use. Such therapeutic antibodies include, but are not limited to, rituximab (Rituxan®, IDEC/Genentech/Roche) (see for example U.S. Pat. No. 5,736,137), a chimeric anti-CD20 antibody approved to treat Non-Hodgkin's lymphoma; HuMax-CD20, an anti-CD20 currently being developed by Genmab, an anti-CD20 antibody described in U.S. Pat. No. 5,500,362, AME-133 (Applied Molecular Evolution), hA20 (Immunomedics, Inc.), HumaLYM (Intracel), and PRO70769 (PCT/US2003/040426, entitled “Immunoglobulin Variants and Uses Thereof”), trastuzumab (Herceptin®, Genentech) (see for example U.S. Pat. No. 5,677,171), a humanized anti-Her2/neu antibody approved to treat breast cancer; pertuzumab (rhuMab-2C4, Omnitarg®), currently being developed by Genentech; an anti-Her2 antibody described in U.S. Pat. No. 4,753,894; cetuximab (Erbitux®, Imclone) (U.S. Pat. No. 4,943,533; PCT WO 96/40210), a chimeric anti-EGFR antibody in clinical trials for a variety of cancers; ABX-EGF (U.S. Pat. No. 6,235,883), currently being developed by Abgenix-Immunex-Amgen; HuMax-EGFr (U.S. Ser. No. 10/172,317), currently being developed by Genmab; 425, EMD55900, EMD62000, and EMD72000 (Merck KGaA) (U.S. Pat. No. 5,558,864; Murthy et al. 1987, Arch Biochem Biophys. 252(2):549-60; Rodeck et al., 1987, J Cell Biochem. 35(4):315-20; Kettleborough et al., 1991, Protein Eng. 4(7):773-83); ICR62 (Institute of Cancer Research) (PCT WO 95/20045; Modjtahedi et al., 1993, J. Cell Biophys. 1993, 22(1-3):129-46; Modjtahedi et al., 1993, Br J Cancer. 1993, 67(2):247-53; Modjtahedi et al, 1996, Br J Cancer, 73(2):228-35; Modjtahedi et al, 2003, Int J Cancer, 105(2):273-80); TheraCIM hR3 (YM Biosciences, Canada and Centro de Immunologia Molecular, Cuba (U.S. Pat. No. 5,891,996; U.S. Pat. No. 6,506,883; Mateo et al, 1997, Immunotechnology, 3(1):71-81); mAb-806 (Ludwig Institue for Cancer Research, Memorial Sloan-Kettering) (Jungbluth et al. 2003, Proc Natl Acad Sci USA. 100(2):639-44); KSB-102 (KS Biomedix); MR1-1 (IVAX, National Cancer Institute) (PCT WO 0162931A2); and SC100 (Scancell) (PCT WO 01/88138); alemtuzumab (Campath®, Millenium), a humanized mAb currently approved for treatment of B-cell chronic lymphocytic leukemia; muromonab-CD3 (Orthoclone OKT3®), an anti-CD3 antibody developed by Ortho Biotech/Johnson & Johnson, ibritumomab tiuxetan (Zevalin®), an anti-CD20 antibody developed by IDEC/Schering AG, gemtuzumab ozogamicin (Mylotarg®), an anti-CD33 (p67 protein) antibody developed by Celltech/Wyeth, alefacept (Amevive®), an anti-LFA-3 Fc fusion developed by Biogen), abciximab (ReoPro®), developed by Centocor/Lilly, basiliximab (Simulect®), developed by Novartis, palivizumab (Synagis®), developed by Medimmune, infliximab (Remicade®), an anti-TNFalpha antibody developed by Centocor, adalimumab (Humira®), an anti-TNFalpha antibody developed by Abbott, Humicade®, an anti-TNFalpha antibody developed by Celltech, golimumab (CNTO-148), a fully human TNF antibody developed by Centocor, etanercept (Enbrel®), an p75 TNF receptor Fc fusion developed by Immunex/Amgen, lenercept, an p55TNF receptor Fc fusion previously developed by Roche, ABX-CBL, an anti-CD147 antibody being developed by Abgenix, ABX-IL8, an anti-IL8 antibody being developed by Abgenix, ABX-MA1, an anti-MUC18 antibody being developed by Abgenix, Pemtumomab (R1549, 90Y-muHMFG1), an anti-MUC1 in development by Antisoma, Therex (R1550), an anti-MUC1 antibody being developed by Antisoma, AngioMab (AS1405), being developed by Antisoma, HuBC-1, being developed by Antisoma, Thioplatin (AS1407) being developed by Antisoma, Antegren® (natalizumab), an anti-alpha-4-beta-1 (VLA-4) and alpha-4-beta-7 antibody being developed by Biogen, VLA-1 mAb, an anti-VLA-1 integrin antibody being developed by Biogen, LTBR mAb, an anti-lymphotoxin beta receptor (LTBR) antibody being developed by Biogen, CAT-152, an anti-TGF-β2 antibody being developed by Cambridge Antibody Technology, ABT 874 (J695), an anti-IL-12 p40 antibody being developed by Abbott, CAT-192, an anti-TGFβ1 antibody being developed by Cambridge Antibody Technology and Genzyme, CAT-213, an anti-Eotaxin1 antibody being developed by Cambridge Antibody Technology, LymphoStat-B® an anti-Blys antibody being developed by Cambridge Antibody Technology and Human Genome Sciences Inc., TRAIL-R1 mAb, an anti-TRAIL-R1 antibody being developed by Cambridge Antibody Technology and Human Genome Sciences, Inc., Avastin® bevacizumab, rhuMAb-VEGF), an anti-VEGF antibody being developed by Genentech, an anti-HER receptor family antibody being developed by Genentech, Anti-Tissue Factor (ATF), an anti-Tissue Factor antibody being developed by Genentech, Xolair® (Omalizumab), an anti-IgE antibody being developed by Genentech, Raptiva® (Efalizumab), an anti-CD11a antibody being developed by Genentech and Xoma, MLN-02 Antibody (formerly LDP-02), being developed by Genentech and Millenium Pharmaceuticals, HuMax CD4, an anti-CD4 antibody being developed by Genmab, HuMax-IL15, an anti-IL15 antibody being developed by Genmab and Amgen, HuMax-Inflam, being developed by Genmab and Medarex, HuMax-Cancer, an anti-Heparanase I antibody being developed by Genmab and Medarex and Oxford GcoSciences, HuMax-Lymphoma, being developed by Genmab and Amgen, HuMax-TAC, being developed by Genmab, IDEC-131, and anti-CD40L antibody being developed by IDEC Pharmaceuticals, IDEC-151 (Clenoliximab), an anti-CD4 antibody being developed by IDEC Pharmaceuticals, IDEC-114, an anti-CD80 antibody being developed by IDEC Pharmaceuticals, IDEC-152, an anti-CD23 being developed by IDEC Pharmaceuticals, anti-macrophage migration factor (MIF) antibodies being developed by IDEC Pharmaceuticals, BEC2, an anti-idiotypic antibody being developed by Imclone, IMC-1C11, an anti-KDR antibody being developed by Imclone, DC101, an anti-flk-1 antibody being developed by Imclone, anti-VE cadherin antibodies being developed by Imclone, CEA-Cide® (labetuzumab), an anti-carcinoembryonic antigen (CEA) antibody being developed by Immunomedics, LymphoCide® (Epratuzumab), an anti-CD22 antibody being developed by Immunomedics, AFP-Cide, being developed by Immunomedics, MyelomaCide, being developed by Immunomedics, LkoCide, being developed by Immunomedics, ProstaCide, being developed by Immunomedics, MDX-010, an anti-CTLA4 antibody being developed by Medarex, MDX-060, an anti-CD30 antibody being developed by Medarex, MDX-070 being developed by Medarex, MDX-018 being developed by Medarex, Osidem® (IDM-1), and anti-Her2 antibody being developed by Medarex and Immuno-Designed Molecules, HuMax®-CD4, an anti-CD4 antibody being developed by Medarex and Genmab, HuMax-IL15, an anti-IL15 antibody being developed by Medarex and Genmab, CNTO 148, an anti-TNFα antibody being developed by Medarex and Centocor/J&J, CNTO 1275, an anti-cytokine antibody being developed by Centocor/J&J, MOR101 and MOR102, anti-intercellular adhesion molecule-1 (ICAM-1) (CD54) antibodies being developed by Morph® Sys, MOR201, an anti-fibroblast growth factor receptor 3 (FGFR-3) antibody being developed by Morph® Sys, Nuvion® (visilizumab), an anti-CD3 antibody being developed by Protein Design Labs, HuZAF®, an anti-gamma interferon antibody being developed by Protein Design Labs, Anti-α5β1 Integrin, being developed by Protein Design Labs, anti-IL-12, being developed by Protein Design Labs, ING-1, an anti-Ep-CAM antibody being developed by Xoma, Xolair® (Omalizumab) a humanized anti-IgE antibody developed by Genentech and Novartis, and MLN01, an anti-Beta2 integrin antibody being developed by Xoma, all of the herein-cited references in this paragraph are expressly incorporated herein by reference. In another embodiment, the therapeutics include KRN330 (Kirin); huA33 antibody (A33, Ludwig Institute for Cancer Research); CNTO 95 (alpha V integrins, Centocor); MEDI-522 (alpha Vf33 integrin, Medimmune); volociximab (alpha Vf31 integrin, Biogen/PDL); Human mAb 216 (B cell glycosolated epitope, NCI); BiTE MT103 (bispecific CD19×CD3, Medimmune); 4G7xH22 (Bispecific Bcell×FcgammaR1, Medarex/Merck KGa); rM28 (Bispecific CD28×MAPG, US Patent No. EP1444268); MDX447 (EMD 82633) (Bispecific CD64×EGFR, Medarex); Catumaxomab (removab) (Bispecific EpCAM× anti-CD3, Trion/Fres); Ertumaxomab (bispecific HER2/CD3, Fresenius Biotech); oregovomab (OvaRex) (CA-125, ViRexx); Rencarex® (WX G250) (carbonic anhydrase IX, Wilex); CNTO 888 (CCL2, Centocor); TRC105 (CD105 (endoglin), Tracon); BMS-663513 (CD137 agonist, Brystol Myers Squibb); MDX-1342 (CD19, Medarex); Siplizumab (MEDI-507) (CD2, Medimmune); Ofatumumab (Humax-CD20) (CD20, Genmab); Rituximab (Rituxan) (CD20, Genentech); veltuzumab (hA20) (CD20, Immunomedics); Epratuzumab (CD22, Amgen); lumiliximab (IDEC 152) (CD23, Biogen); muromonab-CD3 (CD3, Ortho); HuM291 (CD3 fc receptor, PDL Biopharma); HeFi-1, CD30, NCI); MDX-060 (CD30, Medarex); MDX-1401 (CD30, Medarex); SGN-30 (CD30, Seattle Genentics); SGN-33 (Lintuzumab) (CD33, Seattle Genentics); Zanolimumab (HuMax-CD4) (CD4, Genmab); HCD122 (CD40, Novartis); SGN-40 (CD40, Seattle Genentics); Campathlh (Alemtuzumab) (CD52, Genzyme); MDX-1411 (CD70, Medarex); hLL1 (EPB-1) (CD74.38, Immunomedics); Galiximab (IDEC-144) (CD80, Biogen); MT293 (TRC093/D93) (cleaved collagen, Tracon); HuLuc63 (CS1, PDL Pharma); ipilimumab (MDX-010) (CTLA4, Brystol Myers Squibb); Tremelimumab (Ticilimumab, CP-675,2) (CTLA4, Pfizer); HGS-ETR1 (Mapatumumab) (DR4TRAIL-R1 agonist, Human Genome Science/Glaxo Smith Kline); AMG-655 (DR5, Amgen); Apomab (DR5, Genentech); CS-1008 (DR5, Daiichi Sankyo); HGS-ETR2 (lexatumumab) (DR5TRAIL-R2 agonist, HGS); Cetuximab (Erbitux) (EGFR, Imclone); IMC-11F8, (EGFR, Imclone); Nimotuzumab (EGFR, YM Bio); Panitumumab (Vectabix) (EGFR, Amgen); Zalutumumab (HuMaxEGFr) (EGFR, Genmab); CDX-110 (EGFRvIII, AVANT Immunotherapeutics); adecatumumab (MT201) (Epcam, Merck); edrecolomab (Panorex, 17-1A) (Epcam, Glaxo/Centocor); MORAb-003 (folate receptor a, Morphotech); KW-2871 (ganglioside GD3, Kyowa); MORAb-009 (GP-9, Morphotech); CDX-1307 (MDX-1307) (hCGb, Celldex); Trastuzumab (Herceptin) (HER2, Celldex); Pertuzumab (rhuMAb 2C4) (HER2 (DI), Genentech); apolizumab (HLA-DR beta chain, PDL Pharma); AMG-479 (IGF-1R, Amgen); anti-IGF-1R R1507 (IGF1-R, Roche); CP 751871 (IGF1-R, Pfizer); IMC-A12 (IGF1-R, Imclone); BIIB022 (IGF-1R, Biogen); Mik-beta-1 (IL-2Rb (CD122), Hoffman LaRoche); CNTO 328 (IL6, Centocor); Anti-KIR (1-7F9) (Killer cell Ig-like Receptor (KIR), Novo); Hu3S193 (Lewis (y), Wyeth, Ludwig Institute of Cancer Research); hCBE-11 (LTBR, Biogen); HuHMFG1 (MUC1, Antisoma/NCI); RAV12 (N-linked carbohydrate epitope, Raven); CAL (parathyroid hormone-related protein (PTH-rP), University of California); CT-011 (PD1, CureTech); MDX-1106 (ono-4538) (PD1, Medarex/Ono); MAb CT-011 (PD1, Curetech); IMC-3G3 (PDGFRa, Imclone); bavituximab (phosphatidylserine, Peregrine); huJ591 (PSMA, Cornell Research Foundation); muJ591 (PSMA, Cornell Research Foundation); GC1008 (TGFb (pan) inhibitor (IgG4), Genzyme); Infliximab (Remicade) (TNFα, Centocor); A27.15 (transferrin receptor, Salk Institute, INSERN WO 2005/111082); E2.3 (transferrin receptor, Salk Institute); Bevacizumab (Avastin) (VEGF, Genentech); HuMV833 (VEGF, Tsukuba Research Lab-WO/2000/034337, University of Texas); IMC-18F1 (VEGFR1, Imclone); IMC-1121 (VEGFR2, Imclone).

### B. Construction of DVD Molecules:

[0261] The dual variable domain immunoglobulin (DVD-Ig) molecule is designed such that two different light chain variable domains (VL) from the two different parent monoclonal antibodies are linked in tandem directly or via a short linker by recombinant DNA techniques, followed by the light chain constant domain. Similarly, the heavy chain comprises two different heavy chain variable domains (VH) linked in tandem, followed by the constant domain CH1 and Fc region (FIG. 1A).

[0262] The variable domains can be obtained using recombinant DNA techniques from a parent antibody generated by any one of the methods described herein. In an embodiment, the variable domain is a murine heavy or light chain variable domain. In another embodiment, the variable domain is a CDR grafted or a humanized variable heavy or light chain domain. In an embodiment, the variable domain is a human heavy or light chain variable domain.

[0263] In one embodiment the first and second variable domains are linked directly to each other using recombinant DNA techniques. In another embodiment the variable domains are linked via a linker sequence. In an embodiment, two variable domains are linked. Three or more variable domains may also be linked directly or via a linker sequence. The variable domains may bind the same antigen or may bind different antigens. DVD molecules of the invention may include one immunoglobulin variable domain and one non-immunoglobulin variable domain such as ligand binding domain of a receptor, active domain of an enzyme. DVD molecules may also comprise 2 or more non-Ig domains.

[0264] The linker sequence may be a single amino acid or a polypeptide sequence. In an embodiment, the linker sequences are selected from the group consisting of AKTTPKLEEGEFSEAR (SEQ ID NO: 1); AKTTPKLEEGEFSEARV (SEQ ID NO: 2); AKTTPKLGG (SEQ ID NO: 3); SAKTTPKLGG (SEQ ID NO: 4); SAKTTP (SEQ ID NO: 5); RADAAP (SEQ ID NO: 6); RADAAPTVS (SEQ ID NO: 7); RADAAAAGGPGS (SEQ ID NO: 8); RADAAAA(G₄S)₄ (SEQ ID NO: 9); SAKTTPKLEEGEFSEARV (SEQ ID NO: 10); ADAAP (SEQ ID NO: 11); ADAAPTVSIFPP (SEQ ID NO: 12); TVAAP (SEQ ID NO: 13); TVAAPSVFIFPP (SEQ ID NO: 14); QPKAAP (SEQ ID NO: 15); QPKAAPSVTLFPP (SEQ ID NO: 16); AKTTPP (SEQ ID NO: 17); AKTTPPSVTPLAP (SEQ ID NO: 18); AKTTAP (SEQ ID NO: 19); AKTTAPSVYPLAP (SEQ ID NO: 20); ASTKGP (SEQ ID NO: 21); ASTKGPSVFPLAP (SEQ ID NO: 22), GGGGSGGGGSGGGGS (SEQ ID NO: 23); GENKVEYAPALMALS (SEQ ID NO: 24); GPAKELTPLKEAKVS (SEQ ID NO: 25); GHEAAAVMQVQYPAS (SEQ ID NO: 26). The choice of linker sequences is based on crystal structure analysis of several Fab molecules. There is a natural flexible linkage between the variable domain and the CH1/CL constant domain in Fab or antibody molecular structure. This natural linkage comprises approximately 10-12 amino acid residues, contributed by 4-6 residues from C-terminus of V domain and 4-6 residues from the N-terminus of CL/CH1 domain. DVD Igs of the invention were generated using N-terminal 5-6 amino acid residues, or 11-12 amino acid residues, of CL or CH1 as linker in light chain and heavy chain of DVD-Ig, respectively. The N-terminal residues of CL or CH1 domains, particularly the first 5-6 amino acid residues, adopt a loop conformation without strong secondary structures, therefore can act as flexible linkers between the two variable domains. The N-terminal residues of CL or CH1 domains are natural extension of the variable domains, as they are part of the Ig sequences, therefore minimize to a large extent any immunogenicity potentially arising from the linkers and junctions.

[0265] Other linker sequences may include any sequence of any length of CL/CH1 domain but not all residues of CL/CH1 domain; for example the first 5-12 amino acid residues of the CL/CH1 domains; the light chain linkers can be from Cκ or Cλ; and the heavy chain linkers can be derived from CH1 of any isotypes, including Cγ1, Cy2, Cy3, Cy4, Cα1, Cα2, Cδ, Cε, and Cμ. Linker sequences may also be derived from other proteins such as Ig-like proteins, (e.g. TCR, FcR, KIR); G/S based sequences (e.g G4S repeats); hinge region-derived sequences; and other natural sequences from other proteins.

[0266] In an embodiment a constant domain is linked to the two linked variable domains using recombinant DNA techniques. In an embodiment, sequence comprising linked heavy chain variable domains is linked to a heavy chain constant domain and sequence comprising linked light chain variable domains is linked to a light chain constant domain. In an embodiment, the constant domains are human heavy chain constant domain and human light chain constant domain respectively. In an embodiment, the DVD heavy chain is further linked to an Fc region. The Fc region may be a native sequence Fc region, or a variant Fc region. In another embodiment, the Fc region is a human Fc region. In another embodiment the Fc region includes Fc region from IgG1, IgG2, IgG3, IgG4, IgA, IgM, IgE, or IgD.

[0267] In another embodiment two heavy chain DVD polypeptides and two light chain DVD polypeptides are combined to form a DVD-Ig molecule. Table 2 lists amino acid sequences of VH and VL regions of exemplary antibodies for targets useful for treating disease, e.g., for treating cancer. In an embodiment, the invention provides a DVD comprising at least two of the VH and/or VL regions listed in Table 2, in any orientation.

TABLE 2
List of Amino Acid Sequences of VH and VL regions of Antibodies for
Generating DVD-Igs

| SEQ | | | |
|---|---|---|---|
| ID | ABT | Protein | Sequence |
| No. | Unique ID | region | 1234567890123456789012345678901234567890 |
| 27 | AB002VH | VH CD3 | QVQLQQSGAELARPGASVKMSCKASGYTFTRYTMHWVKQR |
| | | | PGQGLEWIGYINPSRGYTNYNQKFKDKATLTTDKSSSTAY |
| | | | MQLSSLTSEDSAVYYCARYYDDHYCLDYWGQGTTLTVSS |
| 28 | AB002VL | VL CD3 | QIVLTQSPAIMSASPGEKVTMTCRASSSVSYMNWYQQKSG |
| | | | TSPKRWIYDTSKVASQVPYRFSGSGSGTSYSLTISSMEAE |
| | | | DAATYYCQQWSSNPLTFGSGTKLEINR |
| 29 | AB005VH | VH RON | EVQLVQSGGGLVKPGGSLRLSCAASGFTFSSYAMHWVRQA |
| | | | PGKGLEWVAVISYDGSNKYYADSVKGRFTISRDNSKNTLY |
| | | | LQMNSLRAEDTAVYYCARFSGWPNNYYYYGMDVWGQGTGV |
| | | | TVSS |
| 30 | AB005VL | VL RON | DVVMTQSPLSLPVTPGEPASISCRSSQSLLHSNGFNYVDW |
| | | | YLQKPQQSPHLLIYFGSYRASGVPDRFSGSGSGTDFTLKI |
| | | | SRVEAEDVGVYYCMQALQTPPWTFGQGTKVEIRR |
| 31 | AB011VH | VH IGF1R | EVQLLESGGGLVQPGGSLRLSCTASGFTFSSYAMNWVRQA |
| | | | PGKGLEWVSAISGSGGTTFYADSVKGRFTISRDNSRTTLY |
| | | | LQMNSLRAEDTAVYYCAKDLGWSDSYYYYYGMDVWGCGTT |
| | | | VTVSS |
| 32 | AB011VL | VL IGF1R | DIQMTQFPSSLSASVGDRVTITCRASQGIRNDLGWYQQKP |
| | | | GKAPKRLIYAASRLHRGVPSRFSGSGSGTEFTLTISSLQP |
| | | | EDFATYYCLQHNSYPCSFGQGTKLEIKR |
| 33 | AB012VH | VH HGF | QVQLVESGGGLVKPGGSLRLSCAASGFTFSDYYMSWIRQA |
| | | | PGKGLEWVSYISSSQSTIYYADSVKGRFTISRDNAKNSLY |
| | | | LQMNSLRAEDTAVYYCARDEYNSQWYVLFDYWGQGTLVTV |
| | | | SS |
| 34 | AB012VL | VL HGF | DIQMTQSPSSVSASVGDRVTITCRASQGISSWLAWYQQKP |
| | | | GKAPNLLIYEASSLCSGVPSRFGGSGSGTDFTLTISSLQP |
| | | | EDFATYYCQQANGFPWTFGQGTKVEIKR |
| 35 | AB014VH | VH VEGF | EVQLVESGGGLVQPGGSLRLSCAASGYTFTNYGMNWVRQA |
| | | (seq. 1) | PGKGLEWVGWINTYTGEPTYAADFKRRFTFSLDTSKSTAY |
| | | | LQMNSLRAEDTAVYYCAKYPHYYQSSHWYFDVWGQQTLVT |
| | | | VSS |
| 36 | AB014VL | VL VEGF | DIQMTQSPSSLSASVGDRVTITCSASQDISNYLNWYQQKP |
| | | (seq. 1) | GKAPKVLIYFTSSLHSGVPSRFSGSGSGTDFTLTISSLQP |
| | | | EDFATYYCQQYSTVPWTFQCQTKVEIKR |
| 37 | AB015VH | VH DLL-4 | EVQLVESGGGLVQPGGSLRLSCAASGFTFTDNWISWVRQA |
| | | | PGKGLEWVGYISPNSGFTYYADSVKGRFTISADTSKNTAY |
| | | | LQMNSLRAEDTAVYYCARDNFGGYFDYWGQGTLVTVSS |
| 38 | AB015VL | VL DLL-4 | DIQMTQSPSSLSASVGDRVTITCRASQDVSTAVAWYQQKP |
| | | | GKAPKLLIYSASFLYSGVPSRFSGSGSGTDFTLTISSLQP |
| | | | EDFATTYYCQQSYTGTVTFGQGTKVEIKR |
| 39 | AB033VH | VH EGFR | QVQLKQSGPGLVQPSQSLSITCTVSGFSLTNYGVHWVRQS |
| | | (seq. 1) | PGKGLEWLGVIWSGGNTDYNTPFTSRLSINKDNSKSQVFF |
| | | | KMNSLQSNDTAIYYCARALTYYDYEFAYWGQGTLVTVSA |
| 40 | AB033VL | VL EGFR | DILLTQSPVILSVSPGERVSFSCRASQSIGTNIHWYQQRT |
| | | (seq. 1) | NGSPRLLIKYASESISGIPSRFSGSGSGTDFTLSINSVES |
| | | | EDIADYYCQQNNNWPTTFGAGTKLELKR |
| 41 | AB047VL | VH PLGF | QVQLQQSGAELVKPGASVKISCKASGYTFTDYYINWVKLA |
| | | | PGQGLEWIGWIYPGSGNTKYNEKFKGKATLTIDTSSSTAY |
| | | | MQLSSLTSEDTAVYFCVRDSPFFDYWGQGTLLTVSS |
| 42 | AB047VH | VL PLGF | DIVLTQSPDSLAVSLGERVTMNCKSSQSLLNSGMRKSFLA |
| | | | WYQQKPGQSPKLLIYWASTRESGVPDRFTGSGSGTDFTLT |
| | | | ISSVQAEDVAVYYCKQSYHLFTEGSGTKLEIKR |
| 43 | AB059VH | VH-RGMa | EVQLVESGGGLVQPGSSLKLSCVASGFTFSNYGMNWIRQA |
| | | | PKKGLEWIGMIYYDSSEKHYADSVKGRFTISRDNSKNTLY |
| | | | LEMNSLRSEDTAIYYCAKGTTPDYWGQGVMVTVSS |
| 44 | AB059VL | VL-RGMa | DVVLTQTPVSLSVTLGDQASMSCRSSQSLEYSDGYTFLEW |
| | | | FLQKPGQSPQLLIYEVSNRFSGVPDRFIGSGSGTDFTLKI |
| | | | SRVEPEDLGVYYCFQATHDPLTFGSGTKLEIKR |
| 45 | AB062VH | VH ErbB3 | QVQLQQWGAGLLKPSETLSLTCAVYGGSFSGYYWSWIRQP |
| | | (seq. 1) | PGKGLEWIGEINHSGSTNYNPSLKSRVTISVETSKNQFSL |
| | | | KLSSVTAADTAVYYCARDKWTWYFDLWGRGTLVTVSS |
| 46 | AB062VL | VL ErbB3 | DIEMTQSPDSLAVSLGERATINCRSSQSVLYSSSNRNYLA |
| | | (seq. 1) | WYQQNPGQPPKLLIYWASTRESGVPDRFSGSGSGTDFTLT |
| | | | ISSLQAEDVAVYYCQQYYSTPRTFGQGTKVEIKR |
| 47 | AB063VH | VH ErbB3 | EVQLVESGGGLVQPGGSLRLSCAASGFTFSIYSMNWVRQA |
| | | (seq. 2) | PGKGLEWVSYISSSSSTIYYADSVKGRFTISRDNAKNSLY |
| | | | LQMNSLRDEDTAVYYCARDRGDFDAFDIWGQGTMVTVSS |
| 48 | AB063VL | VL ErbB3 | DIQMTQSPSSLSASVGDRVTITCQASQDITNYLNWYQQKP |
| | | (seq. 2) | GKAPKLLIYDASNLETGVPSRFSGSGSGTDFTFTISSLQP |
| | | | EDIATYNCQQCENFPITFGQGTRLEIKR |
| 49 | AB064VH | VH EGFR | QVQLQESGPGLVKPSQTLSLTCTVSGYSISSDFAWNWIRQ |
| | | (seq. 2) | PPGKGLEWMGYISYSGNTRYQPSLKSRITISRDTSKNQFF |
| | | | LKLNSVTAADTATYYCVTAGRGFPYWGQGTLVTVSS |
| 50 | AB064VL | VL EGFR | DIQMTQSPSSMSVSVGDRVTITCHSSQDINSNIGWLQQKP |
| | | (seq. 2) | GKSFKGLIYHGTNLDDGVPSRFSGSGSGTDYTLTISSLQP |
| | | | EDFATYYCVQYAQFPWTFGGGTKLEIKR |
| 51 | AB067VH | VH ErbB3 | EVQLLESGGGLVQPGGSLRLSCAASGFTFSHYVMAWVRQA |
| | | (seq. 3) | PGKGLEWVSSISSSGGWTLYADSVKGRFTISRDNSKNTLY |
| | | | LQMNSLRAEDTAVYYCTRGLKMATIFDYWGQGTLVTVSS |
| 52 | AB067VL | VL ErbB3 | QSALTQPASVSGSPGQSITISCTGTSSDVGSYNVVSWYQQ |
| | | (seq. 3) | HPGKAPKLIIYEVSQRPSGVSNRFSGSKSGNTASLTISGL |
| | | | QTEDEADYYCCSYAGSSIFVIFGGGTKVTVLG |
| 53 | AB07QVH | VH VEGF | EVQLVESGGGLVQPGGSLRLSCAASGFTISDYWIHWVRQA |
| | | (seq. 2) | PGKGLEWVAGITPAGGYTYYADSVKGRFTISADTSKNTAY |
| | | | LQMNSLRAEDTAVYYCARFVFFLPYAMDYWGQGTLVIVSS |
| 54 | AB07QVL | VL VEGF | DIQMTQSPSSLSASVGDRVTITCRASQDVSTAVAWYQQKP |
| | | (seq. 2) | GKAPKLLIYSASFLYSGVPSRFSGSGSGTDFTLTISSLQP |
| | | | EDFATYYCQQSYTTPPTFGQGTKVEIKR |
| 55 | AB071VH | VH VEGF | EVQLVESGGGLVQPGGSLRLSCAASGFTINASWIHWVRQA |
| | | (seq. 3) | PGKGLEWVGAIYPYSGYTNYADSVKGRFTISADTSKNTAY |
| | | | LQMNSLRAEDTAVYYCARWGHSTSPWAMDYWGQGTLVTVS |
| | | | S |
| 56 | AB071VL | VL VEGF | DIQMTQSPSSLSASVGDRVTITCRASQVIRRSLAWYQQKP |
| | | (seq. 3) | GKAPKLLIYAASNLASGVPSRFSGSGSGTDFTLTISSLQP |
| | | | EDFATYYCQQSNTSPLTFGQGTKVEIKR |
| 57 | AB059VH | VH-RGMa | EVQLVESGGGLVQPGSSLKLSCVASGFTFSNYGMNWIRQA |
| | | | PKKGLEWIGMIYYDSSEKHYADSVKGRFTISRDNSKNTLY |
| | | | LEMNSLRSEDTAIYYCAKGTTPDYWGQGVMVTVSS |
| 58 | AB059VL | VL-RGMa | DVVLTQTPVSLSVTLGDQASMSCRSSQSLEYSDGYTFLEW |
| | | | FLQKPGQSPQLLIYEVSNRFSGVPDRFIGSGSGTDFTLKI |
| | | | SRVEPEDLGVYYCFQATHDPLTFGSGTKLEIKR |
| 323 | AB122VH | VH EGFR | QVQLQESGPGLVKPSQTLSLTCTVSGYSITSDYAWNWIRQ |
| | | (seq. 3) | PPGKGLEWMGYISYSGNTRYNPSLKSRITISRDTSKNQFF |
| | | | LKLNSVTAADTATYYCATAGRGFPYWGQGTLVTVSS |
| 324 | AB122VL | VL EGFR | DIQMTQSPSSMSVSVGDRVTITCHSSQDINSNIGWLQQKP |
| | | (seq. 3) | GKSFKGLIYHGTNLDDGVPSRFSGSGSGTDYTLTISSLQP |
| | | | EDFATYYCVQYGQFPWTGGGGTKLEIKR |
| 325 | AB123VH | VH EGFR | QVQLQESGPGLVKPSQTLSLTCTVSGYSITSDYAWNWIRQ |
| | | (seq. 4) | PPGKGLEWMGYISYSANTRYNPSLKSRITISRDTSKNQFF |
| | | | LKLNSVTAADTATYYCATAGRGFPYWGQGTLVTVSS |
| 326 | AB123VL | VL EGFR | DIQMTQSPSSMSVSVGDRVTITCHSSQDISSNIGWLQQKP |
| | | (seq. 4) | GKSFKGLIYHGTNLEDGVPSRFSGSGSGTDYTLTISSLQP |
| | | | EDFATYYCVQYGQFPWTFGGGTKLEIKR |
| 327 | AB124VH | VH EGFR | QVQLQESGPGLVKPSQTLSLICTVSGYSITSDYAWNWIRQ |
| | | (seq. 5) | PPGKGLEWMGYISYSGNTRYNPSLRSRITISRDTSKNQFF |
| | | | LKLNSVTAADTATYYCATAGRGFPYWGQGTLVTVSS |
| 328 | AB124VL | VL EGER | DIQMTQSPSSMSVSVGDRVTITCHSSQDINSNIGWLQQKP |
| | | (seq. 5) | GKSFKGLIYHGTNLDDGVPSRFSGSGSGTDYTLTISSLQP |
| | | | EDFATYYCVQYGQFPWTFGGGTKLEIKR |

[0268] Detailed description of specific DVD-Ig molecules capable of binding specific targets, and methods of making the same, is provided in the Examples section below.

### C. Production of DVD Proteins

[0269] Binding proteins of the present invention may be produced by any of a number of techniques known in the art. For example, expression from host cells, wherein expression vector(s) encoding the DVD heavy and DVD light chains is (are) transfected into a host cell by standard techniques. The various forms of the term “transfection” are intended to encompass a wide variety of techniques commonly used for the introduction of exogenous DNA into a prokaryotic or eukaryotic host cell, e.g., electroporation, calcium-phosphate precipitation, DEAE-dextran transfection and the like. Although it is possible to express the DVD proteins of the invention in either prokaryotic or eukaryotic host cells, DVD proteins are expressed in eukaryotic cells, for example, mammalian host cells, because such eukaryotic cells (and in particular mammalian cells) are more likely than prokaryotic cells to assemble and secrete a properly folded and immunologically active DVD protein.

[0270] Exemplary mammalian host cells for expressing the recombinant antibodies of the invention include Chinese Hamster Ovary (CHO cells) (including dhfr-CHO cells, described in Urlaub and Chasin, (1980) Proc. Natl. Acad. Sci. USA 77:4216-4220, used with a DHFR selectable marker, e.g., as described in R. J. Kaufman and P. A. Sharp (1982) Mol. Biol. 159:601-621), NS0 myeloma cells, COS cells, SP2 and PER.C6 cells. When recombinant expression vectors encoding DVD proteins are introduced into mammalian host cells, the DVD proteins are produced by culturing the host cells for a period of time sufficient to allow for expression of the DVD proteins in the host cells or secretion of the DVD proteins into the culture medium in which the host cells are grown. DVD proteins can be recovered from the culture medium using standard protein purification methods.

[0271] In an exemplary system for recombinant expression of DVD proteins of the invention, a recombinant expression vector encoding both the DVD heavy chain and the DVD light chain is introduced into dhfr-CHO cells by calcium phosphate-mediated transfection. Within the recombinant expression vector, the DVD heavy and light chain genes are each operatively linked to CMV enhancer/AdMLP promoter regulatory elements to drive high levels of transcription of the genes. The recombinant expression vector also carries a DHFR gene, which allows for selection of CHO cells that have been transfected with the vector using methotrexate selection/amplification. The selected transformant host cells are cultured to allow for expression of the DVD heavy and light chains and intact DVD protein is recovered from the culture medium. Standard molecular biology techniques are used to prepare the recombinant expression vector, transfect the host cells, select for transformants, culture the host cells and recover the DVD protein from the culture medium. Still further the invention provides a method of synthesizing a DVD protein of the invention by culturing a host cell of the invention in a suitable culture medium until a DVD protein of the invention is synthesized. The method can further comprise isolating the DVD protein from the culture medium.

[0272] An important feature of DVD-Ig is that it can be produced and purified in a similar way as a conventional antibody. The production of DVD-Ig results in a homogeneous, single major product with desired dual-specific activity, without any sequence modification of the constant region or chemical modifications of any kind. Other previously described methods to generate “bi-specific”, “multi-specific”, and “multi-specific multivalent” full length binding proteins do not lead to a single primary product but instead lead to the intracellular or secreted production of a mixture of assembled inactive, mono-specific, multi-specific, multivalent, full length binding proteins, and multivalent full length binding proteins with combination of different binding sites. As an example, based on the design described by Miller and Presta (PCT publication WO2001/077342(A1), there are 16 possible combinations of heavy and light chains. Consequently only 6.25% of protein is likely to be in the desired active form, and not as a single major product or single primary product compared to the other 15 possible combinations. Separation of the desired, fully active forms of the protein from inactive and partially active forms of the protein using standard chromatography techniques, typically used in large scale manufacturing, is yet to be demonstrated.

[0273] Surprisingly the design of the “dual-specific multivalent full length binding proteins” of the present invention leads to a dual variable domain light chain and a dual variable domain heavy chain which assemble primarily to the desired “dual-specific multivalent full length binding proteins”.

[0274] At least 50%, at least 75% and at least 90% of the assembled, and expressed dual variable domain immunoglobulin molecules are the desired dual-specific tetravalent protein. This aspect of the invention particularly enhances the commercial utility of the invention. Therefore, the present invention includes a method to express a dual variable domain light chain and a dual variable domain heavy chain in a single cell leading to a single primary product of a “dual-specific tetravalent full length binding protein”.

[0275] The present invention provides a methods of expressing a dual variable domain light chain and a dual variable domain heavy chain in a single cell leading to a “primary product” of a “dual-specific tetravalent full length binding protein”, where the “primary product” is more than 50% of all assembled protein, comprising a dual variable domain light chain and a dual variable domain heavy chain.

[0276] The present invention provides methods of expressing a dual variable domain light chain and a dual variable domain heavy chain in a single cell leading to a single “primary product” of a “dual-specific tetravalent full length binding protein”, where the “primary product” is more than 75% of all assembled protein, comprising a dual variable domain light chain and a dual variable domain heavy chain.

[0277] The present invention provides methods of expressing a dual variable domain light chain and a dual variable domain heavy chain in a single cell leading to a single “primary product” of a “dual-specific tetravalent full length binding protein”, where the “primary product” is more than 90% of all assembled protein, comprising a dual variable domain light chain and a dual variable domain heavy chain.

### II. Derivatized DVD Binding Proteins:

[0278] One embodiment provides a labeled binding protein wherein the binding protein of the invention is derivatized or linked to another functional molecule (e.g., another peptide or protein). For example, a labeled binding protein of the invention can be derived by functionally linking an binding protein of the invention (by chemical coupling, genetic fusion, noncovalent association or otherwise) to one or more other molecular entities, such as another antibody (e.g., a bispecific antibody or a diabody), a detectable agent, a cytotoxic agent, a pharmaceutical agent, and/or a protein or peptide that can mediate association of the binding protein with another molecule (such as a streptavidin core region or a polyhistidine tag).

[0279] Useful detectable agents with which a binding protein of the invention may be derivatized include fluorescent compounds. Exemplary fluorescent detectable agents include fluorescein, fluorescein isothiocyanate, rhodamine, 5-dimethylamine-1-napthalenesulfonyl chloride, phycoerythrin and the like. A binding protein may also be derivatized with detectable enzymes, such as alkaline phosphatase, horseradish peroxidase, glucose oxidase and the like. When a binding protein is derivatized with a detectable enzyme, it is detected by adding additional reagents that the enzyme uses to produce a detectable reaction product. For example, when the detectable agent horseradish peroxidase is present, the addition of hydrogen peroxide and diaminobenzidine leads to a colored reaction product, which is detectable. a binding protein may also be derivatized with biotin, and detected through indirect measurement of avidin or streptavidin binding.

[0280] Another embodiment of the invention provides a crystallized binding protein and formulations and compositions comprising such crystals. In one embodiment the crystallized binding protein has a greater half-life in vivo than the soluble counterpart of the binding protein. In another embodiment the binding protein retains biological activity after crystallization.

[0281] Crystallized binding protein of the invention may be produced according to methods known in the art and as disclosed in WO 02072636, incorporated herein by reference.

[0282] Another embodiment of the invention provides a glycosylated binding protein wherein the antibody or antigen-binding portion thereof comprises one or more carbohydrate residues. Nascent in vivo protein production may undergo further processing, known as post-translational modification. In particular, sugar (glycosyl) residues may be added enzymatically, a process known as glycosylation. The resulting proteins bearing covalently linked oligosaccharide side chains are known as glycosylated proteins or glycoproteins. Antibodies are glycoproteins with one or more carbohydrate residues in the Fc domain, as well as the variable domain. Carbohydrate residues in the Fc domain have important effect on the effector function of the Fc domain, with minimal effect on antigen binding or half-life of the antibody (R. Jefferis, Biotechnol. Prog. 21 (2005), pp. 11-16). In contrast, glycosylation of the variable domain may have an effect on the antigen binding activity of the antibody. Glycosylation in the variable domain may have a negative effect on antibody binding affinity, likely due to steric hindrance (Co, M. S., et al., Mol. Immunol. (1993) 30:1361-1367), or result in increased affinity for the antigen (Wallick, S. C., et al., Exp. Med. (1988) 168:1099-1109; Wright, A., et al., EMBO J. (1991) 10:2717 2723).

[0283] One aspect of the present invention is directed to generating glycosylation site mutants in which the O- or N-linked glycosylation site of the binding protein has been mutated. One skilled in the art can generate such mutants using standard well-known technologies. Glycosylation site mutants that retain the biological activity but have increased or decreased binding activity are another object of the present invention.

[0284] In still another embodiment, the glycosylation of the antibody or antigen-binding portion of the invention is modified. For example, an aglycoslated antibody can be made (i.e., the antibody lacks glycosylation). Glycosylation can be altered to, for example, increase the affinity of the antibody for antigen. Such carbohydrate modifications can be accomplished by, for example, altering one or more sites of glycosylation within the antibody sequence. For example, one or more amino acid substitutions can be made that result in elimination of one or more variable region glycosylation sites to thereby eliminate glycosylation at that site. Such aglycosylation may increase the affinity of the antibody for antigen. Such an approach is described in further detail in PCT Publication WO2003016466A2, and U.S. Pat. Nos. 5,714,350 and 6,350,861, each of which is incorporated herein by reference in its entirety.

[0285] Additionally or alternatively, a modified binding protein of the invention can be made that has an altered type of glycosylation, such as a hypofucosylated antibody having reduced amounts of fucosyl residues (see Kanda, Yutaka et al., Journal of Biotechnology (2007), 130(3), 300-310.) or an antibody having increased bisecting GlcNAc structures. Such altered glycosylation patterns have been demonstrated to increase the ADCC ability of antibodies. Such carbohydrate modifications can be accomplished by, for example, expressing the antibody in a host cell with altered glycosylation machinery. Cells with altered glycosylation machinery have been described in the art and can be used as host cells in which to express recombinant antibodies of the invention to thereby produce an antibody with altered glycosylation. See, for example, Shields, R. L. et al. (2002) J. Biol. Chem. 277:26733-26740; Umana et al. (1999) Nat. Biotech. 17:176-1, as well as, European Patent No: EP 1,176,195; PCT Publications WO 03/035835; WO 99/54342 80, each of which is incorporated herein by reference in its entirety.

[0286] Protein glycosylation depends on the amino acid sequence of the protein of interest, as well as the host cell in which the protein is expressed. Different organisms may produce different glycosylation enzymes (eg., glycosyltransferases and glycosidases), and have different substrates (nucleotide sugars) available. Due to such factors, protein glycosylation pattern, and composition of glycosyl residues, may differ depending on the host system in which the particular protein is expressed. Glycosyl residues useful in the invention may include, but are not limited to, glucose, galactose, mannose, fucose, n-acetylglucosamine and sialic acid. In an embodiment, the glycosylated binding protein comprises glycosyl residues such that the glycosylation pattern is human.

[0287] It is known to those skilled in the art that differing protein glycosylation may result in differing protein characteristics. For instance, the efficacy of a therapeutic protein produced in a microorganism host, such as yeast, and glycosylated utilizing the yeast endogenous pathway may be reduced compared to that of the same protein expressed in a mammalian cell, such as a CHO cell line. Such glycoproteins may also be immunogenic in humans and show reduced half-life in vivo after administration. Specific receptors in humans and other animals may recognize specific glycosyl residues and promote the rapid clearance of the protein from the bloodstream. Other adverse effects may include changes in protein folding, solubility, susceptibility to proteases, trafficking, transport, compartmentalization, secretion, recognition by other proteins or factors, antigenicity, or allergenicity. Accordingly, a practitioner may choose a therapeutic protein with a specific composition and pattern of glycosylation, for example glycosylation composition and pattern identical, or at least similar, to that produced in human cells or in the species-specific cells of the intended subject animal.

[0288] Expressing glycosylated proteins different from that of a host cell may be achieved by genetically modifying the host cell to express heterologous glycosylation enzymes. Using techniques known in the art a practitioner may generate antibodies or antigen-binding portions thereof exhibiting human protein glycosylation. For example, yeast strains have been genetically modified to express non-naturally occurring glycosylation enzymes such that glycosylated proteins (glycoproteins) produced in these yeast strains exhibit protein glycosylation identical to that of animal cells, especially human cells (U.S. patent applications 20040018590 and 20020137134 and PCT publication WO2005100584 A2).

[0289] In addition to the binding proteins, the present invention is also directed to anti-idiotypic (anti-Id) antibodies specific for such binding proteins of the invention. An anti-Id antibody is an antibody, which recognizes unique determinants generally associated with the antigen-binding region of another antibody. The anti-Id can be prepared by immunizing an animal with the binding protein or a CDR containing region thereof. The immunized animal will recognize, and respond to the idiotypic determinants of the immunizing antibody and produce an anti-Id antibody. It is readily apparent that it may be easier to generate anti-idiotypic antibodies to the two or more parent antibodies incorporated into a DVD-Ig molecule; and confirm binding studies by methods well recognized in the art (e.g., BIAcore, ELISA) to verify that anti-idiotypic antibodies specific for the idiotype of each parent antibody also recognize the idiotype (e.g., antigen binding site) in the context of the DVD-Ig. The anti-idiotypic antibodies specific for each of the two or more antigen binding sites of a DVD-Ig provide ideal reagents to measure DVD-Ig concentrations of a human DVD-Ig in patient serum; DVD-Ig concentration assays can be established using a “sandwich assay ELISA format” with an antibody to a first antigen binding regions coated on the solid phase (e.g., BIAcore chip, ELISA plate etc.), rinsed with rinsing buffer, incubation with the serum sample, another rinsing step and ultimately incubation with another anti-idiotypic antibody to the another antigen binding site, itself labeled with an enzyme for quantitation of the binding reaction. In an embodiment, for a DVD-Ig with more than two different binding sites, anti-idiotypic antibodies to the two outermost binding sites (most distal and proximal from the constant region) will not only help in determining the DVD-Ig concentration in human serum but also document the integrity of the molecule in vivo. Each anti-Id antibody may also be used as an “immunogen” to induce an immune response in yet another animal, producing a so-called anti-anti-Id antibody.

[0290] Further, it will be appreciated by one skilled in the art that a protein of interest may be expressed using a library of host cells genetically engineered to express various glycosylation enzymes, such that member host cells of the library produce the protein of interest with variant glycosylation patterns. A practitioner may then select and isolate the protein of interest with particular novel glycosylation patterns. In an embodiment, the protein having a particularly selected novel glycosylation pattern exhibits improved or altered biological properties.

### III. Uses of DVD-Ig

[0291] Given their ability to bind to two or more antigens the binding proteins of the invention can be used to detect the antigens (e.g., in a biological sample, such as serum or plasma), using a conventional immunoassay, such as an enzyme linked immunosorbent assays (ELISA), an radioimmunoassay (RIA) or tissue immunohistochemistry. The DVD-Ig is directly or indirectly labeled with a detectable substance to facilitate detection of the bound or unbound antibody. Suitable detectable substances include various enzymes, prosthetic groups, fluorescent materials, luminescent materials and radioactive materials. Examples of suitable enzymes include horseradish peroxidase, alkaline phosphatase, β-galactosidase, or acetylcholinesterase; examples of suitable prosthetic group complexes include streptavidin/biotin and avidin/biotin; examples of suitable fluorescent materials include umbelliferone, fluorescein, fluorescein isothiocyanate, rhodamine, dichlorotriazinylamine fluorescein, dansyl chloride or phycoerythrin; an example of a luminescent material includes luminol; and examples of suitable radioactive material include ³H, ¹⁴C, ³⁵S, ⁹⁰Y, ⁹⁹Tc, ¹¹¹In, ¹²⁵I, ¹³¹I, ¹⁷⁷Lu, ¹⁶⁶Ho, or ¹⁵³Sm.

[0292] In an embodiment, the binding proteins of the invention are capable of neutralizing the activity of the antigens both in vitro and in vivo. Accordingly, such DVD-Igs can be used to inhibit antigen activity, e.g., in a cell culture containing the antigens, in human subjects or in other mammalian subjects having the antigens with which a binding protein of the invention cross-reacts. In another embodiment, the invention provides a method for reducing antigen activity in a subject suffering from a disease or disorder in which the antigen activity is detrimental. A binding protein of the invention can be administered to a human subject for therapeutic purposes.

[0293] As used herein, the term “a disorder in which antigen activity is detrimental” is intended to include diseases and other disorders in which the presence of the antigen in a subject suffering from the disorder has been shown to be or is suspected of being either responsible for the pathophysiology of the disorder or a factor that contributes to a worsening of the disorder. Accordingly, a disorder in which antigen activity is detrimental is a disorder in which reduction of antigen activity is expected to alleviate the symptoms and/or progression of the disorder. Such disorders may be evidenced, for example, by an increase in the concentration of the antigen in a biological fluid of a subject suffering from the disorder (e.g., an increase in the concentration of antigen in serum, plasma, synovial fluid, etc. of the subject). Non-limiting examples of disorders that can be treated with the binding proteins of the invention include those disorders discussed below and in the section pertaining to pharmaceutical compositions of the antibodies of the invention.

[0294] The DVD-Igs of the invention may bind one antigen or multiple antigens. Such antigens include, but are not limited to, the targets listed in the following databases, which databases are incorporated herein by reference. These target databases include those listings:

Therapeutic targets (http://xin.cz3.nus.edu.sg/group/cjttd/ttd.asp);
Cytokines and cytokine receptors (http://www.cytokinewebfacts.com/, http://www.copewithcytokines.de/cope.cgi, and
http://cmbi.bjmu.edu.cn/cmbidata/cgf/CGF_Database/cytokine.medic.kumamoto-u.ac.jp/CFC/indexR.html);
Chemokines (http://cytokine.medic.kumamoto-u.ac.jp/CFC/CK/Chemokine.html);
Chemokine receptors and GPCRs (http://csp.medic.kumamoto-u.ac.jp/CSP/Receptor.html, http://www.gper.org/7tm/);
Olfactory Receptors (http://senselab.med.yale.edu/senselab/ORDB/default.asp);
Receptors (http://www.iuphar-db.org/iuphar-rd/list/index.htm);
Cancer targets (http://cged.hgc.jp/cgi-bin/input.cgi);
Secreted proteins as potential antibody targets (http://spd.cbi.pku.edu.cn/);
Protein kinases (http://spd.cbi.pku.edu.cn/), and
Human CD markers (http://content.labvelocity.com/tools/6/1226/CD_table_final_locked.pdf) and (Zola H, 2005 CD molecules 2005: human cell differentiation molecules Blood, 106:3123-6).

[0295] DVD-Igs are useful as therapeutic agents to simultaneously block two different targets to enhance efficacy/safety and/or increase patient coverage. Such targets may include soluble targets (TNF) and cell surface receptor targets (VEGFR and EGFR). It can also be used to induce redirected cytotoxicity between tumor cells and T cells (Her2 and CD3) for cancer therapy, or between autoreactive cell and effector cells for autoimmune disease or transplantation, or between any target cell and effector cell to eliminate disease-causing cells in any given disease.

[0296] In addition, DVD-Ig can be used to trigger receptor clustering and activation when it is designed to target two different epitopes on the same receptor. This may have benefit in making agonistic and antagonistic anti-GPCR therapeutics. In this case, DVD-Ig can be used to target two different epitopes (including epitopes on both the loop regions and the extracellular domain) on one cell for clustering/signaling (two cell surface molecules) or signaling (on one molecule). Similarly, a DVD-Ig molecule can be designed to trigger CTLA-4 ligation, and a negative signal by targeting two different epitopes (or 2 copies of the same epitope) of CTLA-4 extracellular domain, leading to down regulation of the immune response. CTLA-4 is a clinically validated target for therapeutic treatment of a number of immunological disorders. CTLA-4/B7 interactions negatively regulate T cell activation by attenuating cell cycle progression, IL-2 production, and proliferation of T cells following activation, and CTLA-4 (CD152) engagement can down-regulate T cell activation and promote the induction of immune tolerance. However, the strategy of attenuating T cell activation by agonistic antibody engagement of CTLA-4 has been unsuccessful since CTLA-4 activation requires ligation. The molecular interaction of CTLA-4/B7 is in “skewed zipper” arrays, as demonstrated by crystal structural analysis (Stamper 2001 Nature 410:608). However none of the currently available CTLA-4 binding reagents have ligation properties, including anti-CTLA-4 mAbs. There have been several attempts to address this issue. In one case, a cell member-bound single chain antibody was generated, and significantly inhibited allogeneic rejection in mice (Hwang 2002 JI 169:633). In a separate case, artificial APC surface-linked single-chain antibody to CTLA-4 was generated and demonstrated to attenuate T cell responses (Griffin 2000 JI 164:4433). In both cases, CTLA-4 ligation was achieved by closely localized member-bound antibodies in artificial systems. While these experiments provide proof-of-concept for immune down-regulation by triggering CTLA-4 negative signaling, the reagents used in these reports are not suitable for therapeutic use. To this end, CTLA-4 ligation may be achieved by using a DVD-Ig molecule, which target two different epitopes (or 2 copies of the same epitope) of CTLA-4 extracellular domain. The rationale is that the distance spanning two binding sites of an IgG, approximately 150-170 Å, is too large for active ligation of CTLA-4 (30-50 Å between 2 CTLA-4 homodimer). However the distance between the two binding sites on DVD-Ig (one arm) is much shorter, also in the range of 30-50 Å, allowing proper ligation of CTLA-4.

[0297] Similarly, DVD-Ig can target two different members of a cell surface receptor complex (e.g., IL-12R alpha and beta). Furthermore, DVD-Ig can target CR1 and a soluble protein/pathogen to drive rapid clearance of the target soluble protein/pathogen.

[0298] Additionally, DVD-Igs of the invention can be employed for tissue-specific delivery (target a tissue marker and a disease mediator for enhanced local PK thus higher efficacy and/or lower toxicity), including intracellular delivery (targeting an internalizing receptor and a intracellular molecule), delivering to inside brain (targeting transferrin receptor and a CNS disease mediator for crossing the blood-brain barrier). DVD-Ig can also serve as a carrier protein to deliver an antigen to a specific location via binding to a non-neutralizing epitope of that antigen and also to increase the half-life of the antigen. Furthermore, DVD-Ig can be designed to either be physically linked to medical devices implanted into patients or target these medical devices (see Burke, Sandra E.; Kuntz, Richard E.; Schwartz, Lewis B., Zotarolimus eluting stents. Advanced Drug Delivery Reviews (2006), 58(3), 437-446; Surface coatings for biological activation and functionalization of medical devices, Hildebrand, H. F.; Blanchemain, N.; Mayer, G.; Chai, F.; Lefebvre, M.; Boschin, F., Surface and Coatings Technology (2006), 200(22-23), 6318-6324; Drug/device combinations for local drug therapies and infection prophylaxis, Wu, Peng; Grainger, David W., Biomaterials (2006), 27(11), 2450-2467; Mediation of the cytokine network in the implantation of orthopedic devices., Marques, A. P.; Hunt, J. A.; Reis, Rui L., Biodegradable Systems in Tissue Engineering and Regenerative Medicine (2005), 377-397). Briefly, directing appropriate types of cell to the site of medical implant may promote healing and restoring normal tissue function. Alternatively, inhibition of mediators (including but not limited to cytokines), released upon device implantation by a DVD coupled to or target to a device is also provided. For example, Stents have been used for years in interventional cardiology to clear blocked arteries and to improve the flow of blood to the heart muscle. However, traditional bare metal stents have been known to cause restenosis (re-narrowing of the artery in a treated area) in some patients and can lead to blood clots. Recently, an anti-CD34 antibody coated stent has been described which reduced restenosis and prevents blood clots from occurring by capturing endothelial progenitor cells (EPC) circulating throughout the blood. Endothelial cells are cells that line blood vessels, allowing blood to flow smoothly. The EPCs adhere to the hard surface of the stent forming a smooth layer that not only promotes healing but prevents restenosis and blood clots, complications previously associated with the use of stents (Aoji et al. 2005 J Am Coll Cardiol. 45(10):1574-9). In addition to improving outcomes for patients requiring stents, there are also implications for patients requiring cardiovascular bypass surgery. For example, a prosthetic vascular conduit (artificial artery) coated with anti-EPC antibodies would eliminate the need to use arteries from patients legs or arms for bypass surgery grafts. This would reduce surgery and anesthesia times, which in turn will reduce coronary surgery deaths. DVD-Ig are designed in such a way that it binds to a cell surface marker (such as CD34) as well as a protein (or an epitope of any kind, including but not limited to proteins, lipids and polysaccharides) that has been coated on the implanted device to facilitate the cell recruitment. Such approaches can also be applied to other medical implants in general. Alternatively, DVD-Igs can be coated on medical devices and upon implantation and releasing all DVDs from the device (or any other need which may require additional fresh DVD-Ig, including aging and denaturation of the already loaded DVD-Ig) the device could be reloaded by systemic administration of fresh DVD-Ig to the patient, where the DVD-Ig is designed to binds to a target of interest (a cytokine, a cell surface marker (such as CD34) etc.) with one set of binding sites and to a target coated on the device (including a protein, an epitope of any kind, including but not limited to lipids, polysaccharides and polymers) with the other. This technology has the advantage of extending the usefulness of coated implants.

a. Use of DVD-Igs in Various Diseases

[0299] DVD-Ig molecules of the invention are also useful as therapeutic molecules to treat various diseases. Such DVD molecules may bind one or more targets involved in a specific disease. Examples of such targets in various diseases are described below.

### 1. Human Autoimmune and Inflammatory Response

[0300] Many proteins have been implicated in general autoimmune and inflammatory responses, including C5, CCL1 (1-309), CCL11 (eotaxin), CCL13 (mcp-4), CCL15 (MIP-1d), CCL16 (HCC-4), CCL17 (TARC), CCL18 (PARC), CCL19, CCL2 (mcp-1), CCL20 (MIP-3a), CCL21 (MIP-2), CCL23 (MPIF-1), CCL24 (MPIF-2/eotaxin-2), CCL25 (TECK), CCL26, CCL3 (MIP-1a), CCL4 (MIP-1b), CCL5 (RANTES), CCL7 (mcp-3), CCL8 (mcp-2), CXCL1, CXCL10 (IP-10), CXCL11 (1-TAC/IP-9), CXCL12 (SDF1), CXCL13, CXCL14, CXCL2, CXCL3, CXCL5 (ENA-78/LIX), CXCL6 (GCP-2), CXCL9, IL13, IL8, CCL13 (mcp-4), CCR1, CCR2, CCR3, CCR4, CCR5, CCR6, CCR7, CCR8, CCR9, CX3CR1, IL8RA, XCR1 (CCXCR1), IFNA2, IL10, IL13, IL17C, IL1A, IL1B, 1L1F10, IL1F5, IL1F6, IL1F7, IL1F8, IL1F9, IL22, IL5, IL8, IL9, LTA, LTB, MIF, SCYE1 (endothelial Monocyte-activating cytokine), SPP1, TNF, TNFSF5, IFNA2, IL10RA, IL10RB, IL13, IL13RA1, IL5RA, IL9, IL9R, ABCF1, BCL6, C3, C4A, CEBPB, CRP, ICEBERG, IL1R1, IL1RN, IL8RB, LTB4R, TOLLIP, FADD, IRAK1, IRAK2, MYD88, NCK2, TNFAIP3, TRADD, TRAF1, TRAF2, TRAF3, TRAF4, TRAF5, TRAF6, ACVR1, ACVR1B, ACVR2, ACVR2B, ACVRL1, CD28, CD3E, CD3G, CD3Z, CD69, CD80, CD86, CNR1, CTLA4, CYSLTR1, FCER1A, FCER2, FCGR3A, GPR44, HAVCR2, OPRD1, P2RX7, TLR2, TLR3, TLR4, TLR5, TLR6, TLR7, TLR8, TLR9, TLR10, BLR1, CCL1, CCL2, CCL3, CCL4, CCL5, CCL7, CCL8, CCL11, CCL13, CCL15, CCL16, CCL17, CCL18, CCL19, CCL20, CCL21, CCL22, CCL23, CCL24, CCL25, CCR1, CCR2, CCR3, CCR4, CCR5, CCR6, CCR7, CCR8, CCR9, CX3CL1, CX3CR1, CXCL1, CXCL2, CXCL3, CXCL5, CXCL6, CXCL10, CXCL11, CXCL12, CXCL13, CXCR4, GPR2, SCYE1, SDF2, XCL1, XCL2, XCR1, AMH, AMHR2, BMPR1A, BMPR1B, BMPR2, C19orf10 (IL27w), CER1, CSF1, CSF2, CSF3, DKFZp451J0118, FGF2, GFI1, IFNA1, IFNB1, IFNG, IGF1, IL1A, 1L1B, 1L1R1, IL1R2, IL2, IL2RA, IL2RB, IL2RG, IL3, IL4, IL4R, IL5, IL5RA, IL6, IL6R, IL6ST, IL7, IL8, IL8RA, IL8RB, IL9, IL9R, IL10, IL10RA, IL10RB, IL11, IL11RA, IL12A, IL12B, IL12RB1, IL12RB2, IL13, IL13RA1, IL13RA2, IL15, IL15RA, IL16, IL17, IL17R, IL18, IL18R1, IL19, IL20, KITLG, LEP, LTA, LTB, LTB4R, LTB4R2, LTBR, MIF, NPPB, PDGFB, TBX21, TDGF1, TGFA, TGFB1, TGFB1I1, TGFB2, TGFB3, TGFBI, TGFBR1, TGFBR2, TGFBR3, TH1L, TNF, TNFRSF1A, TNFRSF1B, TNFRSF7, TNFRSF8, TNFRSF9, TNFRSF11A, TNFRSF21, TNFSF4, TNFSF5, TNFSF6, TNFSF11, VEGF, ZFPM2, and RNF110 (ZNF144). In one aspect, DVD-Igs capable of binding one or more of the targets listed herein are provided.

### 2. Asthma

[0301] Allergic asthma is characterized by the presence of eosinophilia, goblet cell metaplasia, epithelial cell alterations, airway hyperreactivity (AHR), and Th2 and Th1 cytokine expression, as well as elevated serum IgE levels. It is now widely accepted that airway inflammation is the key factor underlying the pathogenesis of asthma, involving a complex interplay of inflammatory cells such as T cells, B cells, eosinophils, mast cells and macrophages, and of their secreted mediators including cytokines and chemokines. Corticosteroids are the most important anti-inflammatory treatment for asthma today, however their mechanism of action is non-specific and safety concerns exist, especially in the juvenile patient population. The development of more specific and targeted therapies is therefore warranted. There is increasing evidence that IL-13 in mice mimics many of the features of asthma, including AHR, mucus hypersecretion and airway fibrosis, independently of eosinophilic inflammation (Finotto et al., International Immunology (2005), 17(8), 993-1007; Padilla et al., Journal of Immunology (2005), 174(12), 8097-8105).

[0302] IL-13 has been implicated as having a pivotal role in causing pathological responses associated with asthma. The development of anti-IL-13 mAb therapy to reduce the effects of IL-13 in the lung is an exciting new approach that offers considerable promise as a novel treatment for asthma. However other mediators of differential immunological pathways are also involved in asthma pathogenesis, and blocking these mediators, in addition to IL-13, may offer additional therapeutic benefit. Such target pairs include, but are not limited to, IL-13 and a pro-inflammatory cytokine, such as tumor necrosis factor-α (TNF-α). TNF-α may amplify the inflammatory response in asthma and may be linked to disease severity (McDonnell, et al., Progress in Respiratory Research (2001), 31(New Drugs for Asthma, Allergy and COPD), 247-250.). This suggests that blocking both IL-13 and TNF-α may have beneficial effects, particularly in severe airway disease. In another embodiment the DVD-Ig of the invention binds the targets IL-13 and TNFα and is used for treating asthma.

[0303] Animal models such as OVA-induced asthma mouse model, where both inflammation and AHR can be assessed, are known in the art and may be used to determine the ability of various DVD-Ig molecules to treat asthma. Animal models for studying asthma are disclosed in Coffman, et al., Journal of Experimental Medicine (2005), 201(12), 1875-1879; Lloyd, et al., Advances in Immunology (2001), 77, 263-295; Boyce et al., Journal of Experimental Medicine (2005), 201(12), 1869-1873; and Snibson, et al., Journal of the British Society for Allergy and Clinical Immunology (2005), 35(2), 146-52. In addition to routine safety assessments of these target pairs specific tests for the degree of immunosuppression may be warranted and helpful in selecting the best target pairs (see Luster et al., Toxicology (1994), 92(1-3), 229-43; Descotes, et al., Developments in biological standardization (1992), 77 99-102; Hart et al., Journal of Allergy and Clinical Immunology (2001), 108(2), 250-257).

[0304] Based on the rationale disclosed herein and using the same evaluation model for efficacy and safety other pairs of targets that DVD-Ig molecules can bind and be useful to treat asthma may be determined. In an embodiment, such targets include, but are not limited to, IL-13 and IL-1beta, since IL-1beta is also implicated in inflammatory response in asthma; IL-13 and cytokines and chemokines that are involved in inflammation, such as IL-13 and IL-9; IL-13 and IL-4; IL-13 and IL-5; IL-13 and IL-25; IL-13 and TARC; IL-13 and MDC; IL-13 and MIF; IL-13 and TGF-β; IL-13 and LHR agonist; IL-13 and CL25; IL-13 and SPRR2a; IL-13 and SPRR2b; and IL-13 and ADAM8. The present invention also provides DVD-Igs capable of binding one or more targets involved in asthma selected from the group consisting of CSF1 (MCSF), CSF2 (GM-CSF), CSF3 (GCSF), FGF2, IFNA1, IFNB1, IFNG, histamine and histamine receptors, IL1A, IL1B, 1L2, IL3, IL4, IL5, IL6, IL7, IL8, IL9, IL10, IL11, IL12A, IL12B, IL13, IL14, IL15, IL16, IL17, IL18, IL19, KITLG, PDGFB, IL2RA, IL4R, IL5RA, IL8RA, IL8RB, IL12RB1, IL12RB2, IL13RA1, IL13RA2, IL18R1, TSLP, CCL1, CCL2, CCL3, CCL4, CCL5, CCL7, CCL8, CCL13, CCL17, CCL18, CCL19, CCL20, CCL22, CCL24,CX3CL1, CXCL1, CXCL2, CXCL3, XCL1, CCR2, CCR3, CCR4, CCR5, CCR6, CCR7, CCR8, CX3CR1, GPR2, XCR1, FOS, GATA3, JAK1, JAK3, STATE, TBX21, TGFB1, TNF, TNFSF6, YY1, CYSLTR1, FCER1A, FCER2, LTB4R, TB4R2, LTBR, and Chitinase.

### 3. Rheumatoid Arthritis

[0305] Rheumatoid arthritis (RA), a systemic disease, is characterized by a chronic inflammatory reaction in the synovium of joints and is associated with degeneration of cartilage and erosion of juxta-articular bone. Many pro-inflammatory cytokines including TNF, chemokines, and growth factors are expressed in diseased joints. Systemic administration of anti-TNF antibody or sTNFR fusion protein to mouse models of RA was shown to be anti-inflammatory and joint protective. Clinical investigations in which the activity of TNF in RA patients was blocked with intravenously administered infliximab (Harriman G, Harper L K, Schaible T F. 1999 Summary of clinical trials in rheumatoid arthritis using infliximab, an anti-TNFalpha treatment. Ann Rheum Dis 58 Suppl 1:161-4), a chimeric anti-TNF mAb, has provided evidence that TNF regulates IL-6, IL-8, MCP-1, and VEGF production, recruitment of immune and inflammatory cells into joints, angiogenesis, and reduction of blood levels of matrix metalloproteinases-1 and -3. A better understanding of the inflammatory pathway in rheumatoid arthritis has led to identification of other therapeutic targets involved in rheumatoid arthritis. Promising treatments such as interleukin-6 antagonists (IL-6 receptor antibody MRA, developed by Chugai, Roche (see Nishimoto, Norihiro et al., Arthritis & Rheumatism (2004), 50(6), 1761-1769), CTLA4Ig (abatacept, Genovese Mc et al 2005 Abatacept for rheumatoid arthritis refractory to tumor necrosis factor alpha inhibition. N Engl J. Med. 353:1114-23.), and anti-B cell therapy (rituximab, Okamoto H, Kamatani N. 2004 Rituximab for rheumatoid arthritis. N Engl J Med. 351:1909) have already been tested in randomized controlled trials over the past year. Other cytokines have been identified and have been shown to be of benefit in animal models, including interleukin-15 (therapeutic antibody HuMax-IL_{—}15, AMG 714 see Baslund, Bo et al., Arthritis & Rheumatism (2005), 52(9), 2686-2692), interleukin-17, and interleukin-18, and clinical trials of these agents are currently under way. Dual-specific antibody therapy, combining anti-TNF and another mediator, has great potential in enhancing clinical efficacy and/or patient coverage. For example, blocking both TNF and VEGF can potentially eradicate inflammation and angiogenesis, both of which are involved in pathophysiology of RA. Blocking other pairs of targets involved in RA including, but not limited to, TNF and IL-18; TNF and IL-12; TNF and IL-23; TNF and IL-1beta; TNF and MIF; TNF and IL-17; TNF and IL-15 with specific DVD Igs is also contemplated. In addition to routine safety assessments of these target pairs, specific tests for the degree of immunosuppression may be warranted and helpful in selecting the best target pairs (see Luster et al., Toxicology (1994), 92(1-3), 229-43; Descotes, et al., Developments in biological standardization (1992), 77 99-102; Hart et al., Journal of Allergy and Clinical Immunology (2001), 108(2), 250-257). Whether a DVD Ig molecule will be useful for the treatment of rheumatoid arthritis can be assessed using pre-clinical animal RA models such as the collagen-induced arthritis mouse model. Other useful models are also well known in the art (see Brand D D., Comp Med. (2005) 55(2):114-22). Based on the cross-reactivity of the parental antibodies for human and mouse othologues (e.g., reactivity for human and mouse TNF, human and mouse IL-15 etc.) validation studies in the mouse CIA model may be conducted with “matched surrogate antibody” derived DVD-Ig molecules; briefly, a DVD-Ig based on two (or more) mouse target specific antibodies may be matched to the extent possible to the characteristics of the parental human or humanized antibodies used for human DVD-Ig construction (similar affinity, similar neutralization potency, similar half-life etc.).

### 4. SLE

[0306] The immunopathogenic hallmark of SLE is the polyclonal B cell activation, which leads to hyperglobulinemia, autoantibody production and immune complex formation. The fundamental abnormality appears to be the failure of T cells to suppress the forbidden B cell clones due to generalized T cell dysregulation. In addition, B and T-cell interaction is facilitated by several cytokines such as IL-10 as well as co-stimulatory molecules such as CD40 and CD40L, B7 and CD28 and CTLA-4, which initiate the second signal. These interactions together with impaired phagocytic clearance of immune complexes and apoptotic material, perpetuate the immune response with resultant tissue injury. The following targets may be involved in SLE and can potentially be used for DVD-Ig approach for therapeutic intervention: B cell targeted therapies: CD-20, CD-22, CD-19, CD28, CD4, CD80, HLA-DRA, IL10, IL2, IL4, TNFRSF5, TNFRSF6, TNFSF5, TNFSF6, BLR1, HDAC4, HDAC5, HDAC7A, HDAC9, ICOSL, IGBP1, MS4A1, RGS1, SLA2, CD81, IFNB1, IL10, TNFRSF5, TNFRSF7, TNFSF5, AICDA, BLNK, GALNAC4S-6ST, HDAC4, HDAC5, HDAC7A, HDAC9, IL10, IL11, IL4, INHA, INHBA, KLF6, TNFRSF7, CD28, CD38, CD69, CD80, CD83, CD86, DPP4, FCER2, IL2RA, TNFRSF8, TNFSF7, CD24, CD37, CD40, CD72, CD74, CD79A, CD79B, CR2, IL1R2, ITGA2, ITGA3, MS4A1, ST6GAL1, CD1C, CHST10, HLA-A, HLA-DRA, and NT5E.; co-stimulatory signals: CTLA4 or B7.1/B7.2; inhibition of B cell survival: BlyS, BAFF; Complement inactivation: C5; Cytokine modulation: the key principle is that the net biologic response in any tissue is the result of a balance between local levels of proinflammatory or anti-inflammatory cytokines (see Sfikakis P P et al 2005 Curr Opin Rheumatol 17:550-7). SLE is considered to be a Th-2 driven disease with documented elevations in serum IL-4, IL-6, IL-10. DVD Igs capable of binding one or more targets selected from the group consisting of IL-4, IL-6, IL-10, IFN-α, and TNF-α are also contemplated. Combination of targets discussed herein will enhance therapeutic efficacy for SLE which can be tested in a number of lupus preclinical models (see Peng S L (2004) Methods Mol. Med.; 102:227-72). Based on the cross-reactivity of the parental antibodies for human and mouse othologues (e.g., reactivity for human and mouse CD20, human and mouse Interferon alpha etc.) validation studies in a mouse lupus model may be conducted with “matched surrogate antibody” derived DVD-Ig molecules; briefly, a DVD-Ig based two (or more) mouse target specific antibodies may be matched to the extent possible to the characteristics of the parental human or humanized antibodies used for human DVD-Ig construction (similar affinity, similar neutralization potency, similar half-life etc.).

### 5. Multiple Sclerosis

[0307] Multiple sclerosis (MS) is a complex human autoimmune-type disease with a predominantly unknown etiology. Immunologic destruction of myelin basic protein (MBP) throughout the nervous system is the major pathology of multiple sclerosis. MS is a disease of complex pathologies, which involves infiltration by CD4+ and CD8+ T cells and of response within the central nervous system. Expression in the CNS of cytokines, reactive nitrogen species and costimulator molecules have all been described in MS. Of major consideration are immunological mechanisms that contribute to the development of autoimmunity. In particular, antigen expression, cytokine and leukocyte interactions, and regulatory T-cells, which help balance/modulate other T-cells such as Th1 and Th2 cells, are important areas for therapeutic target identification.

[0308] IL-12 is a proinflammatory cytokine that is produced by APC and promotes differentiation of Th1 effector cells. IL-12 is produced in the developing lesions of patients with MS as well as in EAE-affected animals. Previously it was shown that interference in IL-12 pathways effectively prevents EAE in rodents, and that in vivo neutralization of IL-12p40 using a anti-IL-12 mAb has beneficial effects in the myelin-induced EAE model in common marmosets.

[0309] TWEAK is a member of the TNF family, constitutively expressed in the central nervous system (CNS), with pro-inflammatory, proliferative or apoptotic effects depending upon cell types. Its receptor, Fn14, is expressed in CNS by endothelial cells, reactive astrocytes and neurons. TWEAK and Fn14 mRNA expression increased in spinal cord during experimental autoimmune encephalomyelitis (EAE). Anti-TWEAK antibody treatment in myelin oligodendrocyte glycoprotein (MOG) induced EAE in C57BL/6 mice resulted in a reduction of disease severity and leukocyte infiltration when mice were treated after the priming phase.

[0310] One aspect of the invention pertains to DVD Ig molecules capable of binding one or more, for example two, targets selected from the group consisting of IL-12, TWEAK, IL-23, CXCL13, CD40, CD40L, IL-18, VEGF, VLA-4, TNF, CD45RB, CD200, IFNgamma, GM-CSF, FGF, C5, CD52, and CCR2. An embodiment includes a dual-specific anti-IL-12/TWEAK DVD Ig as a therapeutic agent beneficial for the treatment of MS.

[0311] Several animal models for assessing the usefulness of the DVD molecules to treat MS are known in the art (see Steinman L, et al., (2005) Trends Immunol. 26(11):565-71; Lublin FD., et al., (1985) Springer Semin Immunopathol. 8(3):197-208; Genain C P, et al., (1997) J Mol Med. 75(3):187-97; Tuohy V K, et al., (1999) J Exp Med. 189(7):1033-42; Owens T, et al., (1995) Neurol Clin. 13(1):51-73; and 't Hart B A, et al., (2005) J Immunol 175(7):4761-8. Based on the cross-reactivity of the parental antibodies for human and animal species othologues (e.g., reactivity for human and mouse IL-12, human and mouse TWEAK etc.) validation studies in the mouse EAE model may be conducted with “matched surrogate antibody” derived DVD-Ig molecules; briefly, a DVD-Ig based on to (or more) mouse target specific antibodies may be matched to the extent possible to the characteristics of the parental human or humanized antibodies used for human DVD-Ig construction (similar affinity, similar neutralization potency, similar half-life etc.). The same concept applies to animal models in other non-rodent species, where a “matched surrogate antibody” derived DVD-Ig would be selected for the anticipated pharmacology and possibly safety studies. In addition to routine safety assessments of these target pairs specific tests for the degree of immunosuppression may be warranted and helpful in selecting the best target pairs (see Luster et al., Toxicology (1994), 92(1-3), 229-43; Descotes, et al., Developments in biological standardization (1992), 77 99-102; Jones R. 2000 Rovelizumab (ICOS Corp). IDrugs. 3(4):442-6).

### 6. Sepsis

[0312] The pathophysiology of sepsis is initiated by the outer membrane components of both gram-negative organisms (lipopolysaccharide [LPS], lipid A, endotoxin) and gram-positive organisms (lipoteichoic acid, peptidoglycan). These outer membrane components are able to bind to the CD14 receptor on the surface of monocytes. By virtue of the recently described toll-like receptors, a signal is then transmitted to the cell, leading to the eventual production of the proinflammatory cytokines tumor necrosis factor-alpha (TNF-alpha) and interleukin-1 (IL-1). Overwhelming inflammatory and immune responses are essential features of septic shock and play a central part in the pathogenesis of tissue damage, multiple organ failure, and death induced by sepsis. Cytokines, especially tumor necrosis factor (TNF) and interleukin (IL-1), have been shown to be critical mediators of septic shock. These cytokines have a direct toxic effect on tissues; they also activate phospholipase A2. These and other effects lead to increased concentrations of platelet-activating factor, promotion of nitric oxide synthase activity, promotion of tissue infiltration by neutrophils, and promotion of neutrophil activity.

[0313] The treatment of sepsis and septic shock remains a clinical conundrum, and recent prospective trials with biological response modifiers (i.e. anti-TNF, anti-MIF) aimed at the inflammatory response have shown only modest clinical benefit. Recently, interest has shifted toward therapies aimed at reversing the accompanying periods of immune suppression. Studies in experimental animals and critically ill patients have demonstrated that increased apoptosis of lymphoid organs and some parenchymal tissues contribute to this immune suppression, anergy, and organ system dysfunction. During sepsis syndromes, lymphocyte apoptosis can be triggered by the absence of IL-2 or by the release of glucocorticoids, granzymes, or the so-called ‘death’ cytokines: tumor necrosis factor alpha or Fas ligand. Apoptosis proceeds via auto-activation of cytosolic and/or mitochondrial caspases, which can be influenced by the pro- and anti-apoptotic members of the Bcl-2 family. In experimental animals, not only can treatment with inhibitors of apoptosis prevent lymphoid cell apoptosis; it may also improve outcome. Although clinical trials with anti-apoptotic agents remain distant due in large part to technical difficulties associated with their administration and tissue targeting, inhibition of lymphocyte apoptosis represents an attractive therapeutic target for the septic patient. Likewise, a dual-specific agent targeting both inflammatory mediator and a apoptotic mediator, may have added benefit. One aspect of the invention pertains to DVD Igs capable of binding one or more targets involved in sepsis, in an embodiment two targets, selected from the group consisting TNF, IL-1, MIF, IL-6, IL-8, IL-18, IL-12, IL-23, FasL, LPS, Toll-like receptors, TLR-4, tissue factor, MIP-2, ADORA2A, CASP1, CASP4, IL-10, IL-1B, NFKB1, PROC, TNFRSF1A, CSF3, CCR3, IL1RN, MIF, NFKB1, PTAFR, TLR2, TLR4, GPR44, HMOX1, midkine, IRAK1, NFKB2, SERPINA1, SERPINE1, and TREM1. The efficacy of such DVD Igs for sepsis can be assessed in preclinical animal models known in the art (see Buras J A, et al., (2005) Nat Rev Drug Discov. 4(10):854-65 and Calandra T, et al., (2000) Nat. Med. 6(2):164-70).

### 7. Neurological Disorders

### 7.1. Neurodegenerative Diseases

[0314] Chronic neurodegenerative diseases are usually age-dependent diseases characterized by progressive loss of neuronal functions (neuronal cell death, demyelination), loss of mobility and loss of memory. Emerging knowledge of the mechanisms underlying chronic neurodegenerative diseases (e.g., Alzheimer's disease) show a complex etiology and a variety of factors have been recognized to contribute to their development and progression e.g., age, glycemic status, amyloid production and multimerization, accumulation of advanced glycation-end products (AGE) which bind to their receptor RAGE (receptor for AGE), increased brain oxidative stress, decreased cerebral blood flow, neuroinflammation including release of inflammatory cytokines and chemokines, neuronal dysfunction and microglial activation. Thus these chronic neurodegenerative diseases represent a complex interaction between multiple cell types and mediators. Treatment strategies for such diseases are limited and mostly constitute either blocking inflammatory processes with non-specific anti-inflammatory agents (e.g., corticosteroids, COX inhibitors) or agents to prevent neuron loss and/or synaptic functions. These treatments fail to stop disease progression. Recent studies suggest that more targeted therapies such as antibodies to soluble A-b peptide (including the A-b oligomeric forms) can not only help stop disease progression but may help maintain memory as well. These preliminary observations suggest that specific therapies targeting more than one disease mediator (e.g.,A-b and a pro-inflammatory cytokine such as TNF) may provide even better therapeutic efficacy for chronic neurodegenerative diseases than observed with targeting a single disease mechanism (e.g., soluble A-balone) (see C. E. Shepherd, et al, Neurobiol Aging. 2005 Oct. 24; Nelson RB., Curr Pharm Des. 2005; 11:3335; William L. Klein.; Neurochem Int. 2002; 41:345; Michelle C Janelsins, et al., J Neuroinflammation. 2005; 2:23; Soloman B., Curr Alzheimer Res. 2004; 1:149; Igor Klyubin, et al., Nat. Med. 2005; 11:556-61; Arancio O, et al., EMBO Journal (2004) 1-10; Bornemann K D, et al., Am J Pathol. 2001; 158:63; Deane R, et al., Nat. Med. 2003; 9:907-13; and Eliezer Masliah, et al., Neuron. 2005; 46:857).

[0315] The DVD-Ig molecules of the invention can bind one or more targets involved in Chronic neurodegenerative diseases such as Alzheimers. Such targets include, but are not limited to, any mediator, soluble or cell surface, implicated in AD pathogenesis e.g AGE (S100 A, amphoterin), pro-inflammatory cytokines (e.g., IL-1), chemokines (e.g., MCP 1), molecules that inhibit nerve regeneration (e.g., Nogo, RGM A), molecules that enhance neurite growth (neurotrophins). The efficacy of DVD-Ig molecules can be validated in pre-clinical animal models such as the transgenic mice that over-express amyloid precursor protein or RAGE and develop Alzheimer's disease-like symptoms. In addition, DVD-Ig molecules can be constructed and tested for efficacy in the animal models and the best therapeutic DVD-Ig can be selected for testing in human patients. DVD-Ig molecules can also be employed for treatment of other neurodegenerative diseases such as Parkinson's disease. Alpha-Synuclein is involved in Parkinson's pathology. A DVD-Ig capable of targeting alpha-synuclein and inflammatory mediators such as TNF, IL-1, MCP-1 can prove effective therapy for Parkinson's disease and are contemplated in the invention.

### 7.2 Neuronal Regeneration and Spinal Cord Injury

[0316] Despite an increase in knowledge of the pathologic mechanisms, spinal cord injury (SCI) is still a devastating condition and represents a medical indication characterized by a high medical need. Most spinal cord injuries are contusion or compression injuries and the primary injury is usually followed by secondary injury mechanisms (inflammatory mediators e.g., cytokines and chemokines) that worsen the initial injury and result in significant enlargement of the lesion area, sometimes more than 10-fold. These primary and secondary mechanisms in SCI are very similar to those in brain injury caused by other means e.g., stroke. No satisfying treatment exists and high dose bolus injection of methylprednisolone (MP) is the only used therapy within a narrow time window of 8 h post injury. This treatment, however, is only intended to prevent secondary injury without causing any significant functional recovery. It is heavily criticized for the lack of unequivocal efficacy and severe adverse effects, like immunosuppression with subsequent infections and severe histopathological muscle alterations. No other drugs, biologics or small molecules, stimulating the endogenous regenerative potential are approved, but promising treatment principles and drug candidates have shown efficacy in animal models of SCI in recent years. To a large extent the lack of functional recovery in human SCI is caused by factors inhibiting neurite growth, at lesion sites, in scar tissue, in myelin as well as on injury-associated cells. Such factors are the myelin-associated proteins NogoA, OMgp and MAG, RGM A, the scar-associated CSPG (Chondroitin Sulfate Proteoglycans) and inhibitory factors on reactive astrocytes (some semaphorins and ephrins). However, at the lesion site not only growth inhibitory molecules are found but also neurite growth stimulating factors like neurotrophins, laminin, L1 and others. This ensemble of neurite growth inhibitory and growth promoting molecules may explain that blocking single factors, like NogoA or RGM A, resulted in significant functional recovery in rodent SCI models, because a reduction of the inhibitory influences could shift the balance from growth inhibition to growth promotion. However, recoveries observed with blocking a single neurite outgrowth inhibitory molecule were not complete. To achieve faster and more pronounced recoveries either blocking two neurite outgrowth inhibitory molecules e.g Nogo and RGM A, or blocking an neurite outgrowth inhibitory molecule and enhancing functions of a neurite outgrowth enhancing molecule e.g Nogo and neurotrophins, or blocking a neurite outgrowth inhibitory molecule e.g., Nogo and a pro-inflammatory molecule e.g., TNF, may be desirable (see McGee A W, et al., Trends Neurosci. 2003; 26:193; Marco Domeniconi, et al., J Neurol Sci. 2005; 233:43; Milan Makwanal, et al., FEBS J. 2005; 272:2628; Barry J. Dickson, Science. 2002; 298:1959; Felicia Yu Hsuan Teng, et al., J Neurosci Res. 2005; 79:273; Tara Karnezis, et al., Nature Neuroscience 2004; 7, 736; Gang Xu, et al., J. Neurochem. 2004; 91; 1018).

[0317] In one aspect, DVD-Igs capable of binding target pairs such as NgR and RGM A; NogoA and RGM A; MAG and RGM A; OMGp and RGM A; RGM A and RGM B; CSPGs and RGM A; aggrecan, midkine, neurocan, versican, phosphacan, Te38 and TNF-α; Aβ globulomer-specific antibodies combined with antibodies promoting dendrite & axon sprouting are provided. Dendrite pathology is a very early sign of AD and it is known that NOGO A restricts dendrite growth. One can combine such type of ab with any of the SCI-candidate (myelin-proteins) Ab. Other DVD-Ig targets may include any combination of NgR-p75, NgR-Troy, NgR-Nogo66 (Nogo), NgR-Lingo, Lingo-Troy, Lingo-p75, MAG or Omgp. Additionally, targets may also include any mediator, soluble or cell surface, implicated in inhibition of neurite e.g Nogo, Ompg, MAG, RGM A, semaphorins, ephrins, soluble A-b, pro-inflammatory cytokines (e.g., IL-1), chemokines (e.g., MIP 1a), molecules that inhibit nerve regeneration. The efficacy of anti-nogo/anti-RGM A or similar DVD-Ig molecules can be validated in pre-clinical animal models of spinal cord injury. In addition, these DVD-Ig molecules can be constructed and tested for efficacy in the animal models and the best therapeutic DVD-Ig can be selected for testing in human patients. In addition, DVD-Ig molecules can be constructed that target two distinct ligand binding sites on a single receptor e.g., Nogo receptor which binds three ligand Nogo, Ompg, and MAG and RAGE that binds A-b and S100 A. Furthermore, neurite outgrowth inhibitors e.g., nogo and nogo receptor, also play a role in preventing nerve regeneration in immunological diseases like multiple sclerosis. Inhibition of nogo-nogo receptor interaction has been shown to enhance recovery in animal models of multiple sclerosis. Therefore, DVD-Ig molecules that can block the function of one immune mediator eg a cytokine like IL-12 and a neurite outgrowth inhibitor molecule eg nogo or RGM may offer faster and greater efficacy than blocking either an immune or an neurite outgrowth inhibitor molecule alone.

### 8. Oncological Disorders

[0318] Monoclonal antibody therapy has emerged as an important therapeutic modality for cancer (von Mehren M, et al 2003 Monoclonal antibody therapy for cancer. Annu Rev Med.; 54:343-69). Antibodies may exert antitumor effects by inducing apoptosis, redirected cytotoxicity, interfering with ligand-receptor interactions, or preventing the expression of proteins that are critical to the neoplastic phenotype. In addition, antibodies can target components of the tumor microenvironment, perturbing vital structures such as the formation of tumor-associated vasculature. Antibodies can also target receptors whose ligands are growth factors, such as the epidermal growth factor receptor. The antibody thus inhibits natural ligands that stimulate cell growth from binding to targeted tumor cells. Alternatively, antibodies may induce an anti-idiotype network, complement-mediated cytotoxicity, or antibody-dependent cellular cytotoxicity (ADCC). The use of dual-specific antibody that targets two separate tumor mediators will likely give additional benefit compared to a mono-specific therapy. DVD Igs capable of binding the following pairs of targets to treat oncological disease are also contemplated: IGF1 and IGF2; IGF1/2 and HER-2; VEGFR and EGFR; CD20 and CD3; CD138 and CD20; CD38 and CD20; CD38 and CD138; CD40 and CD20; CD138 and CD40; CD38 and CD40; CD-20 and CD-19; CD-20 and EGFR; CD-20 and CD-80; CD-20 and CD-22; CD-3 and HER-2; CD-3 and CD-19; EGFR and HER-2; EGFR and CD-3; EGFR and IGF1,2; EGFR and IGF1R; EGFR and RON; EGFR and HGF; EGFR and c-MET; HER-2 and IGF1,2; HER-2 and IGF1R; RON and HGF; VEGF and EGFR; VEGF and HER-2; VEGF and CD-20; VEGF and IGF1,2; VEGF and DLL4; VEGF and HGF; VEGF and RON; VEGF and NRP1; CD20 and CD3; VEGF and PLGF; DLL4 and PLGF; ErbB3 and EGFR; HGF and ErbB3, HER-2 and ErbB3; c-Met and ErbB3; HER-2 and PLGF; HER-2 and HER-2; EGFR and EGFR; EGFR and DLL-4; EGFR and PLGF; EGFR and RGMa; EGFR and tetanus toxoid; VEGF and tetanus toxoid; and tetanus toxoid and tetanus toxoid.

[0319] In another embodiment, a DVD of the invention is capable of binding VEGF and phosphatidylserine; VEGF and ErbB3; VEGF and PLGF; VEGF and ROBO4; VEGF and BSG2; VEGF and CDCP1; VEGF and ANPEP; VEGF and c-MET; HER-2 and ERB3; HER-2 and BSG2; HER-2 and CDCP1; HER-2 and ANPEP; EGFR and CD64; EGFR and BSG2; EGFR and CDCP1; EGFR and ANPEP; IGF1R and PDGFR; IGF1R and VEGF; IGF1R and CD20; CD20 and CD74; CD20 and CD30; CD20 and DR4; CD20 and VEGFR2; CD20 and CD52; CD20 and CD4; HGF and c-MET; HGF and NRP1; HGF and phosphatidylserine; ErbB3 and IGF1R; ErbB3 and IGF1,2; c-Met and Her-2; c-Met and NRP1; c-Met and IGF1R; IGF1,2 and PDGFR; IGF1,2 and CD20; IGF1,2 and IGF1R; IGF2 and EGFR; IGF2 and HER2; IGF2 and CD20; IGF2 and VEGF; IGF2 and IGF1R; IGF1 and IGF2; PDGFRa and VEGFR2; PDGFRa and PLGF; PDGFRa and VEGF; PDGFRa and c-Met; PDGFRa and EGFR; PDGFRb and VEGFR2; PDGFRb and c-Met; PDGFRb and EGFR; RON and c-Met; RON and MTSP1; RON and MSP; RON and CDCP1; VGFR1 and PLGF; VGFR1 and RON; VGFR1 and EGFR; VEGFR2 and PLGF; VEGFR2 and NRP1; VEGFR2 and RON; VEGFR2 and DLL4; VEGFR2 and EGFR; VEGFR2 and ROBO4; VEGFR2 and CD55; LPA and S1P; EPHB2 and RON; CTLA4 and VEGF; CD3 and EPCAM; CD40 and IL6; CD40 and IGF; CD40 and CD56; CD40 and CD70; CD40 and VEGFR1; CD40 and DR5; CD40 and DR4; CD40 and APRIL; CD40 and BCMA; CD40 and RANKL; CD28 and MAPG; CD80 and CD40; CD80 and CD30; CD80 and CD33; CD80 and CD74; CD80 and CD2; CD80 and CD3; CD80 and CD19; CD80 and CD4; CD80 and CD52; CD80 and VEGF; CD80 and DR5; CD80 and VEGFR2; CD22 and CD20; CD22 and CD80; CD22 and CD40; CD22 and CD23; CD22 and CD33; CD22 and CD74; CD22 and CD19; CD22 and DR5; CD22 and DR4; CD22 and VEGF; CD22 and CD52; CD30 and CD20; CD30 and CD22; CD30 and CD23; CD30 and CD40; CD30 and VEGF; CD30 and CD74; CD30 and CD19; CD30 and DR5; CD30 and DR4; CD30 and VEGFR2; CD30 and CD52; CD30 and CD4; CD138 and RANKL; CD33 and FTL3; CD33 and VEGF; CD33 and VEGFR2; CD33 and CD44; CD33 and DR4; CD33 and DR5; DR4 and CD137; DR4 and IGF1,2; DR4 and IGF1R; DR4 and DR5; DR5 and CD40; DR5 and CD137; DR5 and CD20; DR5 and EGFR; DR5 and IGF1,2; DR5 and IGFR, DR5 and HER-2, EGFR and DLL4. Other target combinations include one or more members of the EGF/erb-2/erb-3 family. Other targets (one or more) involved in oncological diseases that DVD Igs may bind include, but are not limited to those selected from the group consisting of: CD52, CD20, CD19, CD3, CD4, CD8, BMP6, IL12A, IL1A, IL1B, 1L2, IL24, INHA, TNF, TNFSF10, BMP6, EGF, FGF1, FGF10, FGF11, FGF12, FGF13, FGF14, FGF16, FGF17, FGF18, FGF19, FGF2, FGF20, FGF21, FGF22, FGF23, FGF3, FGF4, FGF5, FGF6, FGF7, FGF8, FGF9, GRP, IGF1, IGF2, IL12A, IL1A, 1L1B, 1L2, INHA, TGFA, TGFB1, TGFB2, TGFB3, VEGF, CDK2, FGF10, FGF18, FGF2, FGF4, FGF7, IGF1R, IL2, BCL2, CD164, CDKN1A, CDKN1B, CDKN1C, CDKN2A, CDKN2B, CDKN2C, CDKN3, GNRH1, IGFBP6, IL1A, 1L1B, ODZ1, PAWR, PLG, TGFB1I1, AR, BRCA1, CDK3, CDK4, CDK5, CDK6, CDK7, CDK9, E2F1, EGFR, ENO1, ERBB2, ESR1, ESR2, IGFBP3, IGFBP6, IL2, INSL4, MYC, NOX5, NR6A1, PAP, PCNA, PRKCQ, PRKD1, PRL, TP53, FGF22, FGF23, FGF9, IGFBP3, IL2, INHA, KLK6, TP53, CHGB, GNRH1, IGF1, IGF2, INHA, INSL3, INSL4, PRL, KLK6, SHBG, NR1D1, NR1H3, NR113, NR2F6, NR4A3, ESR1, ESR2, NROB1, NROB2, NR1D2, NR1H2, NR1H4, NR112, NR2C1, NR2C2, NR2E1, NR2E3, NR2F1, NR2F2, NR3C1, NR3C2, NR4A1, NR4A2, NR5A1, NR5A2, NR6A1, PGR, RARB, FGF1, FGF2, FGF6, KLK3, KRT1, APOC1, BRCA1, CHGA, CHGB, CLU, COL1A1, COL6A1, EGF, ERBB2, ERK8, FGF1, FGF10, FGF11, FGF13, FGF14, FGF16, FGF17, FGF18, FGF2, FGF20, FGF21, FGF22, FGF23, FGF3, FGF4, FGF5, FGF6, FGF7, FGF8, FGF9, GNRH1, IGF1, IGF2, IGFBP3, IGFBP6, IL12A, ILIA, IL1B, 1L2, IL24, INHA, INSL3, INSL4, KLK10, KLK12, KLK13, KLK14, KLK15, KLK3, KLK4, KLK5, KLK6, KLK9, MMP2, MMP9, MSMB, NTN4, ODZ1, PAP, PLAU, PRL, PSAP, SERPINA3, SHBG, TGFA, TIMP3, CD44, CDH1, CDH10, CDH19, CDH20, CDH7, CDH9, CDH1, CDH10, CDH13, CDH18, CDH19, CDH20, CDH7, CDH8, CDH9, ROBO2, CD44, ILK, ITGA1, APC, CD164, COL6A1, MTSS1, PAP, TGFB1I1, AGR2, AIG1, AKAP1, AKAP2, CANT1, CAV1, CDH12, CLDN3, CLN3, CYB5, CYC1, DAB21P, DES, DNCL1, ELAC2, ENO2, ENO3, FASN, FLJ12584, FLJ25530, GAGEB1, GAGEC1, GGT1, GSTP1, HIP1, HUMCYT2A, IL29, K6HF, KAI1, KRT2A, MIB1, PART1, PATE, PCA3, PIAS2, PIK3CG, PPID, PR1, PSCA, SLC2A2, SLC33A1, SLC43A1, STEAP, STEAP2, TPM1, TPM2, TRPC6, ANGPT1, ANGPT2, ANPEP, ECGF1, EREG, FGF1, FGF2, FIGF, FLT1, JAG1, KDR, LAMAS, NRP1, NRP2, PGF, PLXDC1, STAB1, VEGF, VEGFC, ANGPTL3, BAI1, COL4A3, IL8, LAMAS, NRP1, NRP2, STAB1, ANGPTL4, PECAM1, PF4, PROK2, SERPINF1, TNFAIP2, CCL11, CCL2, CXCL1, CXCL10, CXCL3, CXCL5, CXCL6, CXCL9, IFNA1, IFNB1, IFNG, IL1B, 1L6, MDK, EDG1, EFNA1, EFNA3, EFNB2, EGF, EPHB4, FGFR3, HGF, IGF1, ITGB3, PDGFA, TEK, TGFA, TGFB1, TGFB2, TGFBR1, CCL2, CDH5, COL18A1, EDG1, ENG, ITGAV, ITGB3, THBS1, THBS2, BAD, BAG1, BCL2, CCNA1, CCNA2, CCND1, CCNE1, CCNE2, CDH1 (E-cadherin), CDKN1B (p27Kip1), CDKN2A (p16INK4a), COL6A1, CTNNB1 (b-catenin), CTSB (cathepsin B), ERBB2 (Her-2), ESR1, ESR2, F3 (TF), FOSL1 (FRA-1), GATA3, GSN (Gelsolin), IGFBP2, IL2RA, IL6, IL6R, IL6ST (glycoprotein 130), ITGA6 (a6 integrin), JUN, KLK5, KRT19, MAP2K7 (c-Jun), MKI67 (Ki-67), NGFB (NGF), NGFR, NME1 (NM23A), PGR, PLAU (uPA), PTEN, SERPINB5 (maspin), SERPINE1 (PAI-1), TGFA, THBS1 (thrombospondin-1), TIE (Tie-1), TNFRSF6 (Fas), TNFSF6 (FasL), TOP2A (topoisomerase Ea), TP53, AZGP1 (zinc-a-glycoprotein), BPAG1 (plectin), CDKN1A (p21Wap1/Cipl), CLDN7 (claudin-7), CLU (clusterin), ERBB2 (Her-2), FGF1, FLRT1 (fibronectin), GABRP (GABAa), GNAS1, ID2, ITGA6 (a6 integrin), ITGB4 (b 4 integrin), KLF5 (GC Box BP), KRT19 (Keratin 19), KRTHB6 (hair-specific type II keratin), MACMARCKS, MT3 (metallothionectin-III), MUC1 (mucin), PTGS2 (COX-2), RAC2 (p21Rac2), S100A2, SCGB1D2 (lipophilin B), SCGB2A1 (mammaglobin 2), SCGB2A2 (mammaglobin 1), SPRR1B (Spr1), THBS1, THBS2, THBS4, and TNFAIP2 (B94), RON, c-Met, CD64, DLL4, PLGF, CTLA4, phophatidylserine, ROBO4, CD80, CD22, CD40, CD23, CD28, CD80, CD55, CD38, CD70, CD74, CD30, CD138, CD56, CD33, CD2, CD137, DR4, DR5, RANKL, VEGFR2, PDGFR, VEGFR1, MTSP1, MSP, EPHB2, EPHA1, EPHA2, EpCAM, PGE2, NKG2D, LPA, SIP, APRIL, BCMA, MAPG, FLT3, PDGFR alpha, PDGFR beta, ROR1, PSMA, PSCA, SCD1, and CD59.

### IV. Pharmaceutical Composition

[0320] The invention also provides pharmaceutical compositions comprising a binding protein, of the invention and a pharmaceutically acceptable carrier. The pharmaceutical compositions comprising binding proteins of the invention are for use in, but not limited to, diagnosing, detecting, or monitoring a disorder, in preventing, treating, managing, or ameliorating of a disorder or one or more symptoms thereof, and/or in research. In a specific embodiment, a composition comprises one or more binding proteins of the invention. In another embodiment, the pharmaceutical composition comprises one or more binding proteins of the invention and one or more prophylactic or therapeutic agents other than binding proteins of the invention for treating a disorder. In an embodiment, the prophylactic or therapeutic agents known to be useful for or having been or currently being used in the prevention, treatment, management, or amelioration of a disorder or one or more symptoms thereof. In accordance with these embodiments, the composition may further comprise of a carrier, diluent or excipient.

[0321] The binding proteins of the invention can be incorporated into pharmaceutical compositions suitable for administration to a subject. Typically, the pharmaceutical composition comprises a binding protein of the invention and a pharmaceutically acceptable carrier. As used herein, “pharmaceutically acceptable carrier” includes any and all solvents, dispersion media, coatings, antibacterial and antifungal agents, isotonic and absorption delaying agents, and the like that are physiologically compatible. Examples of pharmaceutically acceptable carriers include one or more of water, saline, phosphate buffered saline, dextrose, glycerol, ethanol and the like, as well as combinations thereof. In some embodiments, isotonic agents, for example, sugars, polyalcohols such as mannitol, sorbitol, or sodium chloride, are included in the composition. Pharmaceutically acceptable carriers may further comprise minor amounts of auxiliary substances such as wetting or emulsifying agents, preservatives or buffers, which enhance the shelf life or effectiveness of the antibody or antibody portion.

[0322] Various delivery systems are known and can be used to administer one or more antibodies of the invention or the combination of one or more antibodies of the invention and a prophylactic agent or therapeutic agent useful for preventing, managing, treating, or ameliorating a disorder or one or more symptoms thereof, e.g., encapsulation in liposomes, microparticles, microcapsules, recombinant cells capable of expressing the antibody or antibody fragment, receptor-mediated endocytosis (see, e.g., Wu and Wu, J. Biol. Chem. 262:4429-4432 (1987)), construction of a nucleic acid as part of a retroviral or other vector, etc. Methods of administering a prophylactic or therapeutic agent of the invention include, but are not limited to, parenteral administration (e.g., intradermal, intramuscular, intraperitoneal, intravenous and subcutaneous), epidurala administration, intratumoral administration, and mucosal administration (e.g., intranasal and oral routes). In addition, pulmonary administration can be employed, e.g., by use of an inhaler or nebulizer, and formulation with an aerosolizing agent. See, e.g., U.S. Pat. Nos. 6,019,968; 5,985,320; 5,985,309; 5,934,272; 5,874,064; 5,855,913; 5,290,540; and 4,880,078; and PCT Publication Nos. WO 92/19244; WO 97/32572; WO 97/44013; WO 98/31346; and WO 99/66903, each of which is incorporated herein by reference their entireties. In one embodiment, a binding protein of the invention, combination therapy, or a composition of the invention is administered using Alkermes AIR® pulmonary drug delivery technology (Alkermes, Inc., Cambridge, Mass.). In a specific embodiment, prophylactic or therapeutic agents of the invention are administered intramuscularly, intravenously, intratumorally, orally, intranasally, pulmonary, or subcutaneously. The prophylactic or therapeutic agents may be administered by any convenient route, for example by infusion or bolus injection, by absorption through epithelial or mucocutaneous linings (e.g., oral mucosa, rectal and intestinal mucosa, etc.) and may be administered together with other biologically active agents. Administration can be systemic or local.

[0323] In a specific embodiment, it may be desirable to administer the prophylactic or therapeutic agents of the invention locally to the area in need of treatment; this may be achieved by, for example, and not by way of limitation, local infusion, by injection, or by means of an implant, said implant being of a porous or non-porous material, including membranes and matrices, such as sialastic membranes, polymers, fibrous matrices (e.g., Tissue1®), or collagen matrices. In one embodiment, an effective amount of one or more antibodies of the invention antagonists is administered locally to the affected area to a subject to prevent, treat, manage, and/or ameliorate a disorder or a symptom thereof. In another embodiment, an effective amount of one or more antibodies of the invention is administered locally to the affected area in combination with an effective amount of one or more therapies (e.g., one or more prophylactic or therapeutic agents) other than a binding protein of the invention of a subject to prevent, treat, manage, and/or ameliorate a disorder or one or more symptoms thereof.

[0324] In another embodiment, the prophylactic or therapeutic agent can be delivered in a controlled release or sustained release system. In one embodiment, a pump may be used to achieve controlled or sustained release (see Langer, supra; Sefton, 1987, CRC Crit. Ref. Biomed. Eng. 14:20; Buchwald et al., 1980, Surgery 88:507; Saudek et al., 1989, N. Engl. J. Med. 321:574). In another embodiment, polymeric materials can be used to achieve controlled or sustained release of the therapies of the invention (see e.g., Medical Applications of Controlled Release, Langer and Wise (eds.), CRC Pres., Boca Raton, Fla. (1974); Controlled Drug Bioavailability, Drug Product Design and Performance, Smolen and Ball (eds.), Wiley, New York (1984); Ranger and Peppas, 1983, J., Macromol. Sci. Rev. Macromol. Chem. 23:61; see also Levy et al., 1985, Science 228:190; During et al., 1989, Ann. Neurol. 25:351; Howard et al., 1989, J. Neurosurg. 7 1:105); U.S. Pat. No. 5,679,377; U.S. Pat. No. 5,916,597; U.S. Pat. No. 5,912,015; U.S. Pat. No. 5,989,463; U.S. Pat. No. 5,128,326; PCT Publication No. WO 99/15154; and PCT Publication No. WO 99/20253. Examples of polymers used in sustained release formulations include, but are not limited to, poly(2-hydroxy ethyl methacrylate), poly(methyl methacrylate), poly(acrylic acid), poly(ethylene-co-vinyl acetate), poly(methacrylic acid), polyglycolides (PLG), polyanhydrides, poly(N-vinyl pyrrolidone), poly(vinyl alcohol), polyacrylamide, poly(ethylene glycol), polylactides (PLA), poly(lactide-co-glycolides) (PLGA), and polyorthoesters. In an embodiment, the polymer used in a sustained release formulation is inert, free of leachable impurities, stable on storage, sterile, and biodegradable. In yet another embodiment, a controlled or sustained release system can be placed in proximity of the prophylactic or therapeutic target, thus requiring only a fraction of the systemic dose (see, e.g., Goodson, in Medical Applications of Controlled Release, supra, vol. 2, pp. 115-138 (1984)).

[0325] Controlled release systems are discussed in the review by Langer (1990, Science 249:1527-1533). Any technique known to one of skill in the art can be used to produce sustained release formulations comprising one or more therapeutic agents of the invention. See, e.g., U.S. Pat. No. 4,526,938, PCT publication WO 91/05548, PCT publication WO 96/20698, Ning et al., 1996, “Intratumoral Radioimmunotheraphy of a Human Colon Cancer Xenograft Using a Sustained-Release Gel,” Radiotherapy &Oncology 39:179-189, Song et al., 1995, “Antibody Mediated Lung Targeting of Long-Circulating Emulsions,” PDA Journal of Pharmaceutical Science &Technology 50:372-397, Cleek et al., 1997, “Biodegradable Polymeric Carriers for a bFGF Antibody for Cardiovascular Application,” Pro. Int'l. Symp. Control. Rel. Bioact. Mater. 24:853-854, and Lam et al., 1997, “Microencapsulation of Recombinant Humanized Monoclonal Antibody for Local Delivery,” Proc. Int'l. Symp. Control Rel. Bioact. Mater. 24:759-760, each of which is incorporated herein by reference in their entireties.

[0326] In a specific embodiment, where the composition of the invention is a nucleic acid encoding a prophylactic or therapeutic agent, the nucleic acid can be administered in vivo to promote expression of its encoded prophylactic or therapeutic agent, by constructing it as part of an appropriate nucleic acid expression vector and administering it so that it becomes intracellular, e.g., by use of a retroviral vector (see U.S. Pat. No. 4,980,286), or by direct injection, or by use of microparticle bombardment (e.g., a gene gun; Biolistic, Dupont), or coating with lipids or cell-surface receptors or transfecting agents, or by administering it in linkage to a homeobox-like peptide which is known to enter the nucleus (see, e.g., Joliot et al., 1991, Proc. Natl. Acad. Sci. USA 88:1864-1868). Alternatively, a nucleic acid can be introduced intracellularly and incorporated within host cell DNA for expression by homologous recombination.

[0327] A pharmaceutical composition of the invention is formulated to be compatible with its intended route of administration. Examples of routes of administration include, but are not limited to, parenteral, e.g., intravenous, intradermal, subcutaneous, oral, intranasal (e.g., inhalation), transdermal (e.g., topical), transmucosal, and rectal administration. In a specific embodiment, the composition is formulated in accordance with routine procedures as a pharmaceutical composition adapted for intravenous, subcutaneous, intramuscular, oral, intranasal, or topical administration to human beings. Typically, compositions for intravenous administration are solutions in sterile isotonic aqueous buffer. Where necessary, the composition may also include a solubilizing agent and a local anesthetic such as lignocamne to ease pain at the site of the injection.

[0328] If the compositions of the invention are to be administered topically, the compositions can be formulated in the form of an ointment, cream, transdermal patch, lotion, gel, shampoo, spray, aerosol, solution, emulsion, or other form well-known to one of skill in the art. See, e.g., Remington's Pharmaceutical Sciences and Introduction to Pharmaceutical Dosage Forms, 19th ed., Mack Pub. Co., Easton, Pa. (1995). In an embodiment, for non-sprayable topical dosage forms, viscous to semi-solid or solid forms comprising a carrier or one or more excipients compatible with topical application and having a dynamic viscosity greater than water are employed. Suitable formulations include, without limitation, solutions, suspensions, emulsions, creams, ointments, powders, liniments, salves, and the like, which are, if desired, sterilized or mixed with auxiliary agents (e.g., preservatives, stabilizers, wetting agents, buffers, or salts) for influencing various properties, such as, for example, osmotic pressure. Other suitable topical dosage forms include sprayable aerosol preparations wherein the active ingredient, in an embodiment, in combination with a solid or liquid inert carrier, is packaged in a mixture with a pressurized volatile (e.g., a gaseous propellant, such as freon) or in a squeeze bottle. Moisturizers or humectants can also be added to pharmaceutical compositions and dosage forms if desired. Examples of such additional ingredients are well-known in the art.

[0329] If the method of the invention comprises intranasal administration of a composition, the composition can be formulated in an aerosol form, spray, mist or in the form of drops. In particular, prophylactic or therapeutic agents for use according to the present invention can be conveniently delivered in the form of an aerosol spray presentation from pressurized packs or a nebuliser, with the use of a suitable propellant (e.g., dichlorodifluoromethane, trichlorofluoromethane, dichlorotetrafluoroethane, carbon dioxide or other suitable gas). In the case of a pressurized aerosol the dosage unit may be determined by providing a valve to deliver a metered amount. Capsules and cartridges (composed of, e.g., gelatin) for use in an inhaler or insufflator may be formulated containing a powder mix of the compound and a suitable powder base such as lactose or starch.

[0330] If the method of the invention comprises oral administration, compositions can be formulated orally in the form of tablets, capsules, cachets, gelcaps, solutions, suspensions, and the like. Tablets or capsules can be prepared by conventional means with pharmaceutically acceptable excipients such as binding agents (e.g., pregelatinised maize starch, polyvinylpyrrolidone, or hydroxypropyl methylcellulose); fillers (e.g., lactose, microcrystalline cellulose, or calcium hydrogen phosphate); lubricants (e.g., magnesium stearate, talc, or silica); disintegrants (e.g., potato starch or sodium starch glycolate); or wetting agents (e.g., sodium lauryl sulphate). The tablets may be coated by methods well-known in the art. Liquid preparations for oral administration may take the form of, but not limited to, solutions, syrups or suspensions, or they may be presented as a dry product for constitution with water or other suitable vehicle before use.

[0331] Such liquid preparations may be prepared by conventional means with pharmaceutically acceptable additives such as suspending agents (e.g., sorbitol syrup, cellulose derivatives, or hydrogenated edible fats); emulsifying agents (e.g., lecithin or acacia); non-aqueous vehicles (e.g., almond oil, oily esters, ethyl alcohol, or fractionated vegetable oils); and preservatives (e.g., methyl or propyl-p-hydroxybenzoates or sorbic acid). The preparations may also contain buffer salts, flavoring, coloring, and sweetening agents as appropriate. Preparations for oral administration may be suitably formulated for slow release, controlled release, or sustained release of a prophylactic or therapeutic agent(s).

[0332] The method of the invention may comprise pulmonary administration, e.g., by use of an inhaler or nebulizer, of a composition formulated with an aerosolizing agent. See, e.g., U.S. Pat. Nos. 6,019,968; 5,985,320; 5,985,309; 5,934,272; 5,874,064; 5,855,913; 5,290,540; and 4,880,078; and PCT Publication Nos. WO 92/19244; WO 97/32572; WO 97/44013; WO 98/31346; and WO 99/66903, each of which is incorporated herein by reference their entireties. In a specific embodiment, a binding protein of the invention, combination therapy, and/or composition of the invention is administered using Alkermes AIR® pulmonary drug delivery technology (Alkermes, Inc., Cambridge, Mass.).

[0333] The method of the invention may comprise administration of a composition formulated for parenteral administration by injection (e.g., by bolus injection or continuous infusion). Formulations for injection may be presented in unit dosage form (e.g., in ampoules or in multi-dose containers) with an added preservative. The compositions may take such forms as suspensions, solutions or emulsions in oily or aqueous vehicles, and may contain formulatory agents such as suspending, stabilizing and/or dispersing agents. Alternatively, the active ingredient may be in powder form for constitution with a suitable vehicle (e.g., sterile pyrogen-free water) before use.

[0334] The methods of the invention may additionally comprise of administration of compositions formulated as depot preparations. Such long acting formulations may be administered by implantation (e.g., subcutaneously or intramuscularly) or by intramuscular injection. Thus, for example, the compositions may be formulated with suitable polymeric or hydrophobic materials (e.g., as an emulsion in an acceptable oil) or ion exchange resins, or as sparingly soluble derivatives (e.g., as a sparingly soluble salt).

[0335] The methods of the invention encompasse administration of compositions formulated as neutral or salt forms. Pharmaceutically acceptable salts include those formed with anions such as those derived from hydrochloric, phosphoric, acetic, oxalic, tartaric acids, etc., and those formed with cations such as those derived from sodium, potassium, ammonium, calcium, ferric hydroxides, isopropylamine, triethylamine, 2-ethylamino ethanol, histidine, procaine, etc.

[0336] Generally, the ingredients of compositions are supplied either separately or mixed together in unit dosage form, for example, as a dry lyophilized powder or water free concentrate in a hermetically sealed container such as an ampoule or sachette indicating the quantity of active agent. Where the mode of administration is infusion, composition can be dispensed with an infusion bottle containing sterile pharmaceutical grade water or saline. Where the mode of administration is by injection, an ampoule of sterile water for injection or saline can be provided so that the ingredients may be mixed prior to administration.

[0337] In particular, the invention also provides that one or more of the prophylactic or therapeutic agents, or pharmaceutical compositions of the invention is packaged in a hermetically sealed container such as an ampoule or sachette indicating the quantity of the agent. In one embodiment, one or more of the prophylactic or therapeutic agents, or pharmaceutical compositions of the invention is supplied as a dry sterilized lyophilized powder or water free concentrate in a hermetically sealed container and can be reconstituted (e.g., with water or saline) to the appropriate concentration for administration to a subject. In an embodiment, one or more of the prophylactic or therapeutic agents or pharmaceutical compositions of the invention is supplied as a dry sterile lyophilized powder in a hermetically sealed container at a unit dosage of at least 5 mg, at least 10 mg, at least 15 mg, at least 25 mg, at least 35 mg, at least 45 mg, at least 50 mg, at least 75 mg, or at least 100 mg. The lyophilized prophylactic or therapeutic agents or pharmaceutical compositions of the invention should be stored at between 2° C. and 8° C. in its original container and the prophylactic or therapeutic agents, or pharmaceutical compositions of the invention should be administered within 1 week, e.g., within 5 days, within 72 hours, within 48 hours, within 24 hours, within 12 hours, within 6 hours, within 5 hours, within 3 hours, or within 1 hour after being reconstituted. In an alternative embodiment, one or more of the prophylactic or therapeutic agents or pharmaceutical compositions of the invention is supplied in liquid form in a hermetically sealed container indicating the quantity and concentration of the agent. In an embodiment, the liquid form of the administered composition is supplied in a hermetically sealed container at least 0.25 mg/ml, at least 0.5 mg/ml, at least 1 mg/ml, at least 2.5 mg/ml, at least 5 mg/ml, at least 8 mg/ml, at least 10 mg/ml, at least 15 mg/kg, at least 25 mg/ml, at least 50 mg/ml, at least 75 mg/ml or at least 100 mg/ml. The liquid form should be stored at between 2° C. and 8° C. in its original container.

[0338] The binding proteins of the invention can be incorporated into a pharmaceutical composition suitable for parenteral administration. In an embodiment, the antibody or antibody-portions will be prepared as an injectable solution containing 0.1-250 mg/ml binding protein. The injectable solution can be composed of either a liquid or lyophilized dosage form in a flint or amber vial, ampule or pre-filled syringe. The buffer can be L-histidine (1-50 mM), optimally 5-10 mM, at pH 5.0 to 7.0 (optimally pH 6.0). Other suitable buffers include but are not limited to, sodium succinate, sodium citrate, sodium phosphate or potassium phosphate. Sodium chloride can be used to modify the toxicity of the solution at a concentration of 0-300 mM (optimally 150 mM for a liquid dosage form). Cryoprotectants can be included for a lyophilized dosage form, principally 0-10% sucrose (optimally 0.5-1.0%). Other suitable cryoprotectants include trehalose and lactose. Bulking agents can be included for a lyophilized dosage form, principally 1-10% mannitol (optimally 2-4%). Stabilizers can be used in both liquid and lyophilized dosage forms, principally 1-50 mM L-Methionine (optimally 5-10 mM). Other suitable bulking agents include glycine, arginine, can be included as 0-0.05% polysorbate-80 (optimally 0.005-0.01%). Additional surfactants include but are not limited to polysorbate 20 and BRIJ surfactants. The pharmaceutical composition comprising the binding proteins of the invention prepared as an injectable solution for parenteral administration, can further comprise an agent useful as an adjuvant, such as those used to increase the absorption, or dispersion of a therapeutic protein (e.g., antibody). A particularly useful adjuvant is hyaluronidase, such as Hylenex® (recombinant human hyaluronidase). Addition of hyaluronidase in the injectable solution improves human bioavailability following parenteral administration, particularly subcutaneous administration. It also allows for greater injection site volumes (i.e. greater than 1 ml) with less pain and discomfort, and minimum incidence of injection site reactions. (see WO2004078140, and US2006104968 incorporated herein by reference).

[0339] The compositions of this invention may be in a variety of forms. These include, for example, liquid, semi-solid and solid dosage forms, such as liquid solutions (e.g., injectable and infusible solutions), dispersions or suspensions, tablets, pills, powders, liposomes and suppositories. The form chosen depends on the intended mode of administration and therapeutic application. Typical compositions are in the form of injectable or infusible solutions, such as compositions similar to those used for passive immunization of humans with other antibodies. The chosen mode of administration is parenteral (e.g., intravenous, subcutaneous, intraperitoneal, intramuscular). In an embodiment, the antibody is administered by intravenous infusion or injection. In another embodiment, the antibody is administered by intramuscular or subcutaneous injection.

[0340] Therapeutic compositions typically must be sterile and stable under the conditions of manufacture and storage. The composition can be formulated as a solution, microemulsion, dispersion, liposome, or other ordered structure suitable to high drug concentration. Sterile injectable solutions can be prepared by incorporating the active compound (i.e., antibody or antibody portion) in the required amount in an appropriate solvent with one or a combination of ingredients enumerated herein, as required, followed by filtered sterilization. Generally, dispersions are prepared by incorporating the active compound into a sterile vehicle that contains a basic dispersion medium and the required other ingredients from those enumerated herein. In the case of sterile, lyophilized powders for the preparation of sterile injectable solutions, the methods of preparation are vacuum drying and spray-drying that yields a powder of the active ingredient plus any additional desired ingredient from a previously sterile-filtered solution thereof. The proper fluidity of a solution can be maintained, for example, by the use of a coating such as lecithin, by the maintenance of the required particle size in the case of dispersion and by the use of surfactants. Prolonged absorption of injectable compositions can be brought about by including, in the composition, an agent that delays absorption, for example, monostearate salts and gelatin.

[0341] The binding proteins of the present invention can be administered by a variety of methods known in the art, although for many therapeutic applications, in an embodiment, the route/mode of administration is subcutaneous injection, intravenous injection or infusion. As will be appreciated by the skilled artisan, the route and/or mode of administration will vary depending upon the desired results. In certain embodiments, the active compound may be prepared with a carrier that will protect the compound against rapid release, such as a controlled release formulation, including implants, transdermal patches, and microencapsulated delivery systems. Biodegradable, biocompatible polymers can be used, such as ethylene vinyl acetate, polyanhydrides, polyglycolic acid, collagen, polyorthoesters, and polylactic acid. Many methods for the preparation of such formulations are patented or generally known to those skilled in the art. See, e.g., Sustained and Controlled Release Drug Delivery Systems, J. R. Robinson, ed., Marcel Dekker, Inc., New York, 1978.

[0342] In certain embodiments, a binding protein of the invention may be orally administered, for example, with an inert diluent or an assimilable edible carrier. The compound (and other ingredients, if desired) may also be enclosed in a hard or soft shell gelatin capsule, compressed into tablets, or incorporated directly into the subject's diet. For oral therapeutic administration, the compounds may be incorporated with excipients and used in the form of ingestible tablets, buccal tablets, troches, capsules, elixirs, suspensions, syrups, wafers, and the like. To administer a compound of the invention by other than parenteral administration, it may be necessary to coat the compound with, or co-administer the compound with, a material to prevent its inactivation.

[0343] Supplementary active compounds can also be incorporated into the compositions. In certain embodiments, a binding protein of the invention is coformulated with and/or coadministered with one or more additional therapeutic agents that are useful for treating disorders with binding protein of the invention. For example, a binding protein of the invention may be coformulated and/or coadministered with one or more additional antibodies that bind other targets (e.g., antibodies that bind other cytokines or that bind cell surface molecules). Furthermore, one or more antibodies of the invention may be used in combination with two or more of the foregoing therapeutic agents. Such combination therapies may advantageously utilize lower dosages of the administered therapeutic agents, thus avoiding possible toxicities or complications associated with the various monotherapies.

[0344] In certain embodiments, a binding protein is linked to a half-life extending vehicle known in the art. Such vehicles include, but are not limited to, the Fc domain, polyethylene glycol, and dextran. Such vehicles are described, e.g., in U.S. application Ser. No. 09/428,082 and published PCT Application No. WO 99/25044, which are hereby incorporated by reference for any purpose.

[0345] In a specific embodiment, nucleic acid sequences encoding a binding protein of the invention or another prophylactic or therapeutic agent of the invention are administered to treat, prevent, manage, or ameliorate a disorder or one or more symptoms thereof by way of gene therapy. Gene therapy refers to therapy performed by the administration to a subject of an expressed or expressible nucleic acid. In this embodiment of the invention, the nucleic acids produce their encoded antibody or prophylactic or therapeutic agent of the invention that mediates a prophylactic or therapeutic effect.

[0346] Any of the methods for gene therapy available in the art can be used according to the present invention. For general reviews of the methods of gene therapy, see Goldspiel et al., 1993, Clinical Pharmacy 12:488-505; Wu and Wu, 1991, Biotherapy 3:87-95; Tolstoshev, 1993, Ann. Rev. Pharmacol. Toxicol. 32:573-596; Mulligan, Science 260:926-932 (1993); and Morgan and Anderson, 1993, Ann. Rev. Biochem. 62:191-217; May, 1993, TIBTECH 11(5):155-215. Methods commonly known in the art of recombinant DNA technology which can be used are described in Ausubel et al. (eds.), Current Protocols in Molecular Biology, John Wiley &Sons, NY (1993); and Kriegler, Gene Transfer and Expression, A Laboratory Manual, Stockton Press, NY (1990). Detailed description of various methods of gene therapy are disclosed in US20050042664 A1 which is incorporated herein by reference.

[0347] The binding proteins of the invention are useful in treating various diseases wherein the targets that are recognized by the binding proteins are detrimental. Such diseases include, but are not limited to, rheumatoid arthritis, osteoarthritis, juvenile chronic arthritis, septic arthritis, Lyme arthritis, psoriatic arthritis, reactive arthritis, spondyloarthropathy, systemic lupus erythematosus, Crohn's disease, ulcerative colitis, inflammatory bowel disease, insulin dependent diabetes mellitus, thyroiditis, asthma, allergic diseases, psoriasis, dermatitis scleroderma, graft versus host disease, organ transplant rejection, acute or chronic immune disease associated with organ transplantation, sarcoidosis, atherosclerosis, disseminated intravascular coagulation, Kawasaki's disease, Grave's disease, nephrotic syndrome, chronic fatigue syndrome, Wegener's granulomatosis, Henoch-Schoenlein purpurea, microscopic vasculitis of the kidneys, chronic active hepatitis, uveitis, septic shock, toxic shock syndrome, sepsis syndrome, cachexia, infectious diseases, parasitic diseases, acquired immunodeficiency syndrome, acute transverse myelitis, Huntington's chorea, Parkinson's disease, Alzheimer's disease, stroke, primary biliary cirrhosis, hemolytic anemia, malignancies, heart failure, myocardial infarction, Addison's disease, sporadic, polyglandular deficiency type I and polyglandular deficiency type II, Schmidt's syndrome, adult (acute) respiratory distress syndrome, alopecia, alopecia greata, seronegative arthopathy, arthropathy, Reiter's disease, psoriatic arthropathy, ulcerative colitic arthropathy, enteropathic synovitis, chlamydia, yersinia and salmonella associated arthropathy, spondyloarthopathy, atheromatous disease/arteriosclerosis, atopic allergy, autoimmune bullous disease, pemphigus vulgaris, pemphigus foliaceus, pemphigoid, linear IgA disease, autoimmune haemolytic anaemia, Coombs positive haemolytic anaemia, acquired pernicious anaemia, juvenile pernicious anaemia, myalgic encephalitis/Royal Free Disease, chronic mucocutaneous candidiasis, giant cell arteritis, primary sclerosing hepatitis, cryptogenic autoimmune hepatitis, Acquired Immunodeficiency Disease Syndrome, Acquired Immunodeficiency Related Diseases, Hepatitis B, Hepatitis C, common varied immunodeficiency (common variable hypogammaglobulinaemia), dilated cardiomyopathy, female infertility, ovarian failure, premature ovarian failure, fibrotic lung disease, cryptogenic fibrosing alveolitis, post-inflammatory interstitial lung disease, interstitial pneumonitis, connective tissue disease associated interstitial lung disease, mixed connective tissue disease associated lung disease, systemic sclerosis associated interstitial lung disease, rheumatoid arthritis associated interstitial lung disease, systemic lupus erythematosus associated lung disease, dermatomyositis/polymyositis associated lung disease, Sjögren's disease associated lung disease, ankylosing spondylitis associated lung disease, vasculitic diffuse lung disease, haemosiderosis associated lung disease, drug-induced interstitial lung disease, fibrosis, radiation fibrosis, bronchiolitis obliterans, chronic eosinophilic pneumonia, lymphocytic infiltrative lung disease, postinfectious interstitial lung disease, gouty arthritis, autoimmune hepatitis, type-1 autoimmune hepatitis (classical autoimmune or lupoid hepatitis), type-2 autoimmune hepatitis (anti-LKM antibody hepatitis), autoimmune mediated hypoglycaemia, type B insulin resistance with acanthosis nigricans, hypoparathyroidism, acute immune disease associated with organ transplantation, chronic immune disease associated with organ transplantation, osteoarthrosis, primary sclerosing cholangitis, psoriasis type 1, psoriasis type 2, idiopathic leucopaenia, autoimmune neutropaenia, renal disease NOS, glomerulonephritides, microscopic vasulitis of the kidneys, lyme disease, discoid lupus erythematosus, male infertility idiopathic or NOS, sperm autoimmunity, multiple sclerosis (all subtypes), sympathetic ophthalmia, pulmonary hypertension secondary to connective tissue disease, Goodpasture's syndrome, pulmonary manifestation of polyarteritis nodosa, acute rheumatic fever, rheumatoid spondylitis, Still's disease, systemic sclerosis, Sjörgren's syndrome, Takayasu's disease/arteritis, autoimmune thrombocytopaenia, idiopathic thrombocytopaenia, autoimmune thyroid disease, hyperthyroidism, goitrous autoimmune hypothyroidism (Hashimoto's disease), atrophic autoimmune hypothyroidism, primary myxoedema, phacogenic uveitis, primary vasculitis, vitiligo acute liver disease, chronic liver diseases, alcoholic cirrhosis, alcohol-induced liver injury, choleosatatis, idiosyncratic liver disease, Drug-Induced hepatitis, Non-alcoholic Steatohepatitis, allergy and asthma, group B streptococci (GBS) infection, mental disorders (e.g., depression and schizophrenia), Th2 Type and Th1 Type mediated diseases, acute and chronic pain (different forms of pain), and cancers such as lung, breast, stomach, bladder, colon, pancreas, ovarian, prostate and rectal cancer and hematopoietic malignancies (leukemia and lymphoma), Abetalipoprotemia, Acrocyanosis, acute and chronic parasitic or infectious processes, acute leukemia, acute lymphoblastic leukemia (ALL), acute myeloid leukemia (AML), acute or chronic bacterial infection, acute pancreatitis, acute renal failure, adenocarcinomas, aerial ectopic beats, AIDS dementia complex, alcohol-induced hepatitis, allergic conjunctivitis, allergic contact dermatitis, allergic rhinitis, allograft rejection, alpha-1-antitrypsin deficiency, amyotrophic lateral sclerosis, anemia, angina pectoris, anterior horn cell degeneration, anti cd3 therapy, antiphospholipid syndrome, anti-receptor hypersensitivity reactions, aordic and peripheral aneuryisms, aortic dissection, arterial hypertension, arteriosclerosis, arteriovenous fistula, ataxia, atrial fibrillation (sustained or paroxysmal), atrial flutter, atrioventricular block, B cell lymphoma, bone graft rejection, bone marrow transplant (BMT) rejection, bundle branch block, Burkitt's lymphoma, Burns, cardiac arrhythmias, cardiac stun syndrome, cardiac tumors, cardiomyopathy, cardiopulmonary bypass inflammation response, cartilage transplant rejection, cerebellar cortical degenerations, cerebellar disorders, chaotic or multifocal atrial tachycardia, chemotherapy associated disorders, chromic myelocytic leukemia (CML), chronic alcoholism, chronic inflammatory pathologies, chronic lymphocytic leukemia (CLL), chronic obstructive pulmonary disease (COPD), chronic salicylate intoxication, colorectal carcinoma, congestive heart failure, conjunctivitis, contact dermatitis, cor pulmonale, coronary artery disease, Creutzfeldt-Jakob disease, culture negative sepsis, cystic fibrosis, cytokine therapy associated disorders, Dementia pugilistica, demyelinating diseases, dengue hemorrhagic fever, dermatitis, dermatologic conditions, diabetes, diabetes mellitus, diabetic ateriosclerotic disease, Diffuse Lewy body disease, dilated congestive cardiomyopathy, disorders of the basal ganglia, Down's Syndrome in middle age, drug-induced movement disorders induced by drugs which block CNS dopamine receptors, drug sensitivity, eczema, encephalomyelitis, endocarditis, endocrinopathy, epiglottitis, epstein-barr virus infection, erythromelalgia, extrapyramidal and cerebellar disorders, familial hematophagocytic lymphohistiocytosis, fetal thymus implant rejection, Friedreich's ataxia, functional peripheral arterial disorders, fungal sepsis, gas gangrene, gastric ulcer, glomerular nephritis, graft rejection of any organ or tissue, gram negative sepsis, gram positive sepsis, granulomas due to intracellular organisms, hairy cell leukemia, Hallervorden-Spatz disease, hashimoto's thyroiditis, hay fever, heart transplant rejection, hemachromatosis, hemodialysis, hemolytic uremic syndrome/thrombolytic thrombocytopenic purpura, hemorrhage, hepatitis (A), His bundle arrythmias, HIV infection/HIV neuropathy, Hodgkin's disease, hyperkinetic movement disorders, hypersensitity reactions, hypersensitivity pneumonitis, hypertension, hypokinetic movement disorders, hypothalamic-pituitary-adrenal axis evaluation, idiopathic Addison's disease, idiopathic pulmonary fibrosis, antibody mediated cytotoxicity, Asthenia, infantile spinal muscular atrophy, inflammation of the aorta, influenza a, ionizing radiation exposure, iridocyclitis/uveitis/optic neuritis, ischemia-reperfusion injury, ischemic stroke, juvenile rheumatoid arthritis, juvenile spinal muscular atrophy, Kaposi's sarcoma, kidney transplant rejection, legionella, leishmaniasis, leprosy, lesions of the corticospinal system, lipedema, liver transplant rejection, lymphederma, malaria, malignant Lymphoma, malignant histiocytosis, malignant melanoma, meningitis, meningococcemia, metabolic/idiopathic, migraine headache, mitochondrial multi.system disorder, mixed connective tissue disease, monoclonal gammopathy, multiple myeloma, multiple systems degenerations (Mencel Dejerine-Thomas Shi-Drager and Machado-Joseph), myasthenia gravis, mycobacterium avium intracellulare, mycobacterium tuberculosis, myelodyplastic syndrome, myocardial infarction, myocardial ischemic disorders, nasopharyngeal carcinoma, neonatal chronic lung disease, nephritis, nephrosis, neurodegenerative diseases, neurogenic I muscular atrophies, neutropenic fever, non-hodgkins lymphoma, occlusion of the abdominal aorta and its branches, occulsive arterial disorders, okt3 therapy, orchitis/epidydimitis, orchitis/vasectomy reversal procedures, organomegaly, osteoporosis, pancreas transplant rejection, pancreatic carcinoma, paraneoplastic syndrome/hypercalcemia of malignancy, parathyroid transplant rejection, pelvic inflammatory disease, perennial rhinitis, pericardial disease, peripheral atherlosclerotic disease, peripheral vascular disorders, peritonitis, pernicious anemia, pneumocystis carinii pneumonia, pneumonia, POEMS syndrome (polyneuropathy, organomegaly, endocrinopathy, monoclonal gammopathy, and skin changes syndrome), post perfusion syndrome, post pump syndrome, post-MI cardiotomy syndrome, preeclampsia, Progressive supranucleo Palsy, primary pulmonary hypertension, radiation therapy, Raynaud's phenomenon and disease, Raynoud's disease, Refsum's disease, regular narrow QRS tachycardia, renovascular hypertension, reperfusion injury, restrictive cardiomyopathy, sarcomas, scleroderma, senile chorea, Senile Dementia of Lewy body type, seronegative arthropathies, shock, sickle cell anemia, skin allograft rejection, skin changes syndrome, small bowel transplant rejection, solid tumors, specific arrythmias, spinal ataxia, spinocerebellar degenerations, streptococcal myositis, structural lesions of the cerebellum, Subacute sclerosing panencephalitis, Syncope, syphilis of the cardiovascular system, systemic anaphalaxis, systemic inflammatory response syndrome, systemic onset juvenile rheumatoid arthritis, T-cell or FAB ALL, Telangiectasia, thromboangitis obliterans, thrombocytopenia, toxicity, transplants, trauma/hemorrhage, type III hypersensitivity reactions, type IV hypersensitivity, unstable angina, uremia, urosepsis, urticaria, valvular heart diseases, varicose veins, vasculitis, venous diseases, venous thrombosis, ventricular fibrillation, viral and fungal infections, vital encephalitis/aseptic meningitis, vital-associated hemaphagocytic syndrome, Wernicke-Korsakoff syndrome, Wilson's disease, xenograft rejection of any organ or tissue. (see Peritt et al. PCT publication No. WO2002097048A2, Leonard et al., PCT publication No. WO9524918 A1, and Salfeld et al., PCT publication No. WO00/56772A1).

[0348] The binding proteins of the invention can be used to treat humans suffering from autoimmune diseases, in particular those associated with inflammation, including, rheumatoid arthritis, spondylitis, allergy, autoimmune diabetes, autoimmune uveitis. In an embodiment, the binding proteins of the invention or antigen-binding portions thereof, are used to treat rheumatoid arthritis, Crohn's disease, multiple sclerosis, insulin dependent diabetes mellitus and psoriasis.

[0349] In an embodiment, diseases that can be treated or diagnosed with the compositions and methods of the invention include, but are not limited to, primary and metastatic cancers, including carcinomas of breast, colon, rectum, lung, oropharynx, hypopharynx, esophagus, stomach, pancreas, liver, gallbladder and bile ducts, small intestine, urinary tract (including kidney, bladder and urothelium), female genital tract (including cervix, uterus, and ovaries as well as choriocarcinoma and gestational trophoblastic disease), male genital tract (including prostate, seminal vesicles, testes and germ cell tumors), endocrine glands (including the thyroid, adrenal, and pituitary glands), and skin, as well as hemangiomas, melanomas, sarcomas (including those arising from bone and soft tissues as well as Kaposi's sarcoma), tumors of the brain, nerves, eyes, and meninges (including astrocytomas, gliomas, glioblastomas, retinoblastomas, neuromas, neuroblastomas, Schwannomas, and meningiomas), solid tumors arising from hematopoietic malignancies such as leukemias, and lymphomas (both Hodgkin's and non-Hodgkin's lymphomas).

[0350] In an embodiment, the antibodies of the invention or antigen-binding portions thereof, are used to treat cancer or in the prevention of metastases from the tumors described herein either when used alone or in combination with radiotherapy and/or other chemotherapeutic agents.

[0351] The antibodies of the invention, or antigen binding portions thereof, may be combined with agents that include but are not limited to, antineoplastic agents, radiotherapy, chemotherapy such as DNA alkylating agents, cisplatin, carboplatin, anti-tubulin agents, paclitaxel, docetaxel, taxol, doxorubicin, gemcitabine, gemzar, anthracyclines, adriamycin, topoisomerase I inhibitors, topoisomerase II inhibitors, 5-fluorouracil (5-FU), leucovorin, irinotecan, receptor tyrosine kinase inhibitors (e.g., erlotinib, gefitinib), COX-2 inhibitors (e.g., celecoxib), kinase inhibitors, and siRNAs.

[0352] A binding protein of the invention also can be administered with one or more additional therapeutic agents useful in the treatment of various diseases.

[0353] A binding protein of the invention can be used alone or in combination to treat such diseases. It should be understood that the binding proteins can be used alone or in combination with an additional agent, e.g., a therapeutic agent, said additional agent being selected by the skilled artisan for its intended purpose. For example, the additional agent can be a therapeutic agent art-recognized as being useful to treat the disease or condition being treated by the antibody of the present invention. The additional agent also can be an agent that imparts a beneficial attribute to the therapeutic composition e.g., an agent which effects the viscosity of the composition.

[0354] It should further be understood that the combinations which are to be included within this invention are those combinations useful for their intended purpose. The agents set forth below are illustrative for purposes and not intended to be limited. The combinations, which are part of this invention, can be the antibodies of the present invention and at least one additional agent selected from the lists below. The combination can also include more than one additional agent, e.g., two or three additional agents if the combination is such that the formed composition can perform its intended function.

[0355] Combinations to treat autoimmune and inflammatory diseases are non-steroidal anti-inflammatory drug(s) also referred to as NSAIDS which include drugs like ibuprofen. Other combinations are corticosteroids including prednisolone; the well known side-effects of steroid use can be reduced or even eliminated by tapering the steroid dose required when treating patients in combination with the DVD Igs of this invention. Non-limiting examples of therapeutic agents for rheumatoid arthritis with which an antibody, or antibody portion, of the invention can be combined include the following: cytokine suppressive anti-inflammatory drug(s) (CSAIDs); antibodies to or antagonists of other human cytokines or growth factors, for example, TNF, LT, IL-1, IL-2, IL-3, IL-4, IL-5, IL-6, IL-7, IL-8, IL-15, IL-16, IL-18, IL-21, IL-23, interferons, EMAP-II, GM-CSF, FGF, and PDGF. Binding proteins of the invention, or antigen binding portions thereof, can be combined with antibodies to cell surface molecules such as CD2, CD3, CD4, CD8, CD25, CD28, CD30, CD40, CD45, CD69, CD80 (B7.1), CD86 (B7.2), CD90, CTLA or their ligands including CD154 (gp39 or CD40L).

[0356] Combinations of therapeutic agents may interfere at different points in the autoimmune and subsequent inflammatory cascade; examples include TNF antagonists like chimeric, humanized or human TNF antibodies, ADALIMUMAB, (PCT Publication No. WO 97/29131), CA2 (Remicade™), CDP 571, and soluble p55 or p75 TNF receptors, derivatives, thereof, (p75TNFR1gG (Enbrel™) or p55TNFR1gG (Lenercept), and also TNFα converting enzyme (TACE) inhibitors; similarly IL-1 inhibitors (Interleukin-1-converting enzyme inhibitors, IL-1RA etc.) may be effective for the same reason. Other combinations include Interleukin 11. Yet another combination include key players of the autoimmune response which may act parallel to, dependent on or in concert with IL-12 function; especially are IL-18 antagonists including IL-18 antibodies or soluble IL-18 receptors, or IL-18 binding proteins. It has been shown that IL-12 and IL-18 have overlapping but distinct functions and a combination of antagonists to both may be most effective. Yet another combination are non-depleting anti-CD4 inhibitors. Yet other combinations include antagonists of the co-stimulatory pathway CD80 (B7.1) or CD86 (B7.2) including antibodies, soluble receptors or antagonistic ligands.

[0357] The binding proteins of the invention may also be combined with agents, such as methotrexate, 6-MP, azathioprine sulphasalazine, mesalazine, olsalazine chloroquinine/hydroxychloroquine, pencillamine, aurothiomalate (intramuscular and oral), azathioprine, cochicine, corticosteroids (oral, inhaled and local injection), beta-2 adrenoreceptor agonists (salbutamol, terbutaline, salmeteral), xanthines (theophylline, aminophylline), cromoglycate, nedocromil, ketotifen, ipratropium and oxitropium, cyclosporin, FK506, rapamycin, mycophenolate mofetil, leflunomide, NSAIDs, for example, ibuprofen, corticosteroids such as prednisolone, phosphodiesterase inhibitors, adensosine agonists, antithrombotic agents, complement inhibitors, adrenergic agents, agents which interfere with signalling by proinflammatory cytokines such as TNF-α or IL-1 (e.g., IRAK, NIK, IKK, p38 or MAP kinase inhibitors), IL-1β converting enzyme inhibitors, TNFα converting enzyme (TACE) inhibitors, T-cell signalling inhibitors such as kinase inhibitors, metalloproteinase inhibitors, sulfasalazine, azathioprine, 6-mercaptopurines, angiotensin converting enzyme inhibitors, soluble cytokine receptors and derivatives thereof (e.g., soluble p55 or p75 TNF receptors and the derivatives p75TNFRIgG (Enbrel™ and p55TNFRIgG (Lenercept)), sIL-1R1, sIL-1R11, sIL-6R), antiinflammatory cytokines (e.g., IL-4, IL-10, IL-11, IL-13 and TGFβ), celecoxib, folic acid, hydroxychloroquine sulfate, rofecoxib, etanercept, infliximab, naproxen, valdecoxib, sulfasalazine, methylprednisolone, meloxicam, methylprednisolone acetate, gold sodium thiomalate, aspirin, triamcinolone acetonide, propoxyphene napsylate/apap, folate, nabumetone, diclofenac, piroxicam, etodolac, diclofenac sodium, oxaprozin, oxycodone hcl, hydrocodone bitartrate/apap, diclofenac sodium/misoprostol, fentanyl, anakinra, human recombinant, tramadol hcl, salsalate, sulindac, cyanocobalamin/fa/pyridoxine, acetaminophen, alendronate sodium, prednisolone, morphine sulfate, lidocaine hydrochloride, indomethacin, glucosamine sulf/chondroitin, amitriptyline hcl, sulfadiazine, oxycodone hcl/acetaminophen, olopatadine hcl, misoprostol, naproxen sodium, omeprazole, cyclophosphamide, rituximab, IL-1 TRAP, MRA, CTLA4-IG, IL-18 BP, anti-IL-18, Anti-IL15, BIRB-796, SC10-469, VX-702, AMG-548, VX-740, Roflumilast, IC-485, CDC-801, and Mesopram. Combinations include methotrexate or leflunomide and in moderate or severe rheumatoid arthritis cases, cyclosporine.

[0358] Nonlimiting additional agents which can also be used in combination with a binding protein to treat rheumatoid arthritis include, but are not limited to, the following: non-steroidal anti-inflammatory drug(s) (NSAIDs); cytokine suppressive anti-inflammatory drug(s) (CSAIDs); CDP-571/BAY-10-3356 (humanized anti-TNFα antibody; Celltech/Bayer); cA2/infliximab (chimeric anti-TNFα antibody; Centocor); 75 kdTNFR-IgG/etanercept (75 kD TNF receptor-IgG fusion protein; Immunex; see e.g., Arthritis & Rheumatism (1994) Vol. 37, 5295; J. Invest. Med. (1996) Vol. 44, 235A); 55 kdTNF-IgG (55 kD TNF receptor-IgG fusion protein; Hoffmann-LaRoche); IDEC-CE9.1/SB 210396 (non-depleting primatized anti-CD4 antibody; IDEC/SmithKline; see e.g., Arthritis & Rheumatism (1995) Vol. 38, S185); DAB 486-IL-2 and/or DAB 389-IL-2 (IL-2 fusion proteins; Seragen; see e.g., Arthritis & Rheumatism (1993) Vol. 36, 1223); Anti-Tac (humanized anti-IL-2Ra; Protein Design Labs/Roche); IL-4 (anti-inflammatory cytokine; DNAX/Schering); IL-10 (SCH 52000; recombinant IL-10, anti-inflammatory cytokine; DNAX/Schering); IL-4; IL-10 and/or IL-4 agonists (e.g., agonist antibodies); IL-1RA (IL-1 receptor antagonist; Synergen/Amgen); anakinra (Kineret®/Amgen); TNF-bp/s-TNF (soluble TNF binding protein; see e.g., Arthritis & Rheumatism (1996) Vol. 39, No. 9 (supplement), 5284; Amer. J. Physiol.—Heart and Circulatory Physiology (1995) Vol. 268, pp. 37-42); R973401 (phosphodiesterase Type IV inhibitor; see e.g., Arthritis & Rheumatism (1996) Vol. 39, No. 9 (supplement), S282); MK-966 (COX-2 Inhibitor; see e.g., Arthritis & Rheumatism (1996) Vol. 39, No. 9 (supplement), S81); Iloprost (see e.g., Arthritis & Rheumatism (1996) Vol. 39, No. 9 (supplement), S82); methotrexate; thalidomide (see e.g., Arthritis & Rheumatism (1996) Vol. 39, No. 9 (supplement), 5282) and thalidomide-related drugs (e.g., Celgen); leflunomide (anti-inflammatory and cytokine inhibitor; see e.g., Arthritis & Rheumatism (1996) Vol. 39, No. 9 (supplement), S131; Inflammation Research (1996) Vol. 45, pp. 103-107); tranexamic acid (inhibitor of plasminogen activation; see e.g., Arthritis & Rheumatism (1996) Vol. 39, No. 9 (supplement), S284); T-614 (cytokine inhibitor; see e.g., Arthritis & Rheumatism (1996) Vol. 39, No. 9 (supplement), S282); prostaglandin E1 (see e.g., Arthritis & Rheumatism (1996) Vol. 39, No. 9 (supplement), S282); Tenidap (non-steroidal anti-inflammatory drug; see e.g., Arthritis & Rheumatism (1996) Vol. 39, No. 9 (supplement), S280); Naproxen (non-steroidal anti-inflammatory drug; see e.g., Neuro Report (1996) Vol. 7, pp. 1209-1213); Meloxicam (non-steroidal anti-inflammatory drug); Ibuprofen (non-steroidal anti-inflammatory drug); Piroxicam (non-steroidal anti-inflammatory drug); Diclofenac (non-steroidal anti-inflammatory drug); Indomethacin (non-steroidal anti-inflammatory drug); Sulfasalazine (see e.g., Arthritis & Rheumatism (1996) Vol. 39, No. 9 (supplement), S281); Azathioprine (see e.g., Arthritis & Rheumatism (1996) Vol. 39, No. 9 (supplement), S281); ICE inhibitor (inhibitor of the enzyme interleukin-1β converting enzyme); zap-70 and/or lck inhibitor (inhibitor of the tyrosine kinase zap-70 or lck); VEGF inhibitor and/or VEGF-R inhibitor (inhibitors of vascular endothelial cell growth factor or vascular endothelial cell growth factor receptor; inhibitors of angiogenesis); corticosteroid anti-inflammatory drugs (e.g., SB203580); TNF-convertase inhibitors; anti-IL-12 antibodies; anti-IL-18 antibodies; interleukin-11 (see e.g., Arthritis & Rheumatism (1996) Vol. 39, No. 9 (supplement), S296); interleukin-13 (see e.g., Arthritis & Rheumatism (1996) Vol. 39, No. 9 (supplement), S308); interleukin-17 inhibitors (see e.g., Arthritis & Rheumatism (1996) Vol. 39, No. 9 (supplement), S120); gold; penicillamine; chloroquine; chlorambucil; hydroxychloroquine; cyclosporine; cyclophosphamide; total lymphoid irradiation; anti-thymocyte globulin; anti-CD4 antibodies; CD5-toxins; orally-administered peptides and collagen; lobenzarit disodium; Cytokine Regulating Agents (CRAs) HP228 and HP466 (Houghten Pharmaceuticals, Inc.); ICAM-1 antisense phosphorothioate oligo-deoxynucleotides (ISIS 2302; Isis Pharmaceuticals, Inc.); soluble complement receptor 1 (TP10; T Cell Sciences, Inc.); prednisone; orgotein; glycosaminoglycan polysulphate; minocycline; anti-IL2R antibodies; marine and botanical lipids (fish and plant seed fatty acids; see e.g., DeLuca et al. (1995) Rheum. Dis. Clin. North Am. 21:759-777); auranofin; phenylbutazone; meclofenamic acid; flufenamic acid; intravenous immune globulin; zileuton; azaribine; mycophenolic acid (RS-61443); tacrolimus (FK-506); sirolimus (rapamycin); amiprilose (therafectin); cladribine (2-chlorodeoxyadenosine); methotrexate; bcl-2 inhibitors (see Bruncko, Milan et al., Journal of Medicinal Chemistry (2007), 50(4), 641-662); antivirals and immune modulating agents.

[0359] In one embodiment, the binding protein or antigen-binding portion thereof, is administered in combination with one of the following agents for the treatment of rheumatoid arthritis: small molecule inhibitor of KDR, small molecule inhibitor of Tie-2; methotrexate; prednisone; celecoxib; folic acid; hydroxychloroquine sulfate; rofecoxib; etanercept; infliximab; leflunomide; naproxen; valdecoxib; sulfasalazine; methylprednisolone; ibuprofen; meloxicam; methylprednisolone acetate; gold sodium thiomalate; aspirin; azathioprine; triamcinolone acetonide; propxyphene napsylate/apap; folate; nabumetone; diclofenac; piroxicam; etodolac; diclofenac sodium; oxaprozin; oxycodone hcl; hydrocodone bitartrate/apap; diclofenac sodium/misoprostol; fentanyl; anakinra, human recombinant; tramadol hcl; salsalate; sulindac; cyanocobalamin/fa/pyridoxine; acetaminophen; alendronate sodium; prednisolone; morphine sulfate; lidocaine hydrochloride; indomethacin; glucosamine sulfate/chondroitin; cyclosporine; amitriptyline hcl; sulfadiazine; oxycodone hcl/acetaminophen; olopatadine hcl; misoprostol; naproxen sodium; omeprazole; mycophenolate mofetil; cyclophosphamide; rituximab; IL-1 TRAP; MRA; CTLA4-IG; IL-18 BP; IL-12/23; anti-IL 18; anti-IL 15; BIRB-796; SCIO-469; VX-702; AMG-548; VX-740; Roflumilast; IC-485; CDC-801; and mesopram.

[0360] Non-limiting examples of therapeutic agents for inflammatory bowel disease with which a binding protein of the invention can be combined include the following: budenoside; epidermal growth factor; corticosteroids; cyclosporin, sulfasalazine; aminosalicylates; 6-mercaptopurine; azathioprine; metronidazole; lipoxygenase inhibitors; mesalamine; olsalazine; balsalazide; antioxidants; thromboxane inhibitors; IL-1 receptor antagonists; anti-IL-1β mAbs; anti-IL-6 mAbs; growth factors; elastase inhibitors; pyridinyl-imidazole compounds; antibodies to or antagonists of other human cytokines or growth factors, for example, TNF, LT, IL-1, IL-2, IL-6, IL-7, IL-8, IL-15, IL-16, IL-17, IL-18, EMAP-II, GM-CSF, FGF, and PDGF. Antibodies of the invention, or antigen binding portions thereof, can be combined with antibodies to cell surface molecules such as CD2, CD3, CD4, CD8, CD25, CD28, CD30, CD40, CD45, CD69, CD90 or their ligands. The antibodies of the invention, or antigen binding portions thereof, may also be combined with agents, such as methotrexate, cyclosporin, FK506, rapamycin, mycophenolate mofetil, leflunomide, NSAIDs, for example, ibuprofen, corticosteroids such as prednisolone, phosphodiesterase inhibitors, adenosine agonists, antithrombotic agents, complement inhibitors, adrenergic agents, agents which interfere with signalling by proinflammatory cytokines such as TNFα or IL-1 (e.g.,IRAK, NIK, IKK, p38 or MAP kinase inhibitors), IL-1β converting enzyme inhibitors, TNFα converting enzyme inhibitors, T-cell signalling inhibitors such as kinase inhibitors, metalloproteinase inhibitors, sulfasalazine, azathioprine, 6-mercaptopurines, angiotensin converting enzyme inhibitors, soluble cytokine receptors and derivatives thereof (e.g., soluble p55 or p75 TNF receptors, sIL-1R1, sIL-1R11, sIL-6R) and antiinflammatory cytokines (e.g., IL-4, IL-10, IL-11, IL-13 and TGFβ) and bcl-2 inhibitors.

[0361] Examples of therapeutic agents for Crohn's disease in which a binding protein can be combined include the following: TNF antagonists, for example, anti-TNF antibodies, ADALIMUMAB (PCT Publication No. WO 97/29131; HUMIRA), CA2 (REMICADE), CDP 571, TNFR-Ig constructs, (p75TNFRIgG (ENBREL) and p55TNFRIgG (LENERCEPT)) inhibitors and PDE4 inhibitors. Antibodies of the invention, or antigen binding portions thereof, can be combined with corticosteroids, for example, budenoside and dexamethasone. Binding proteins of the invention or antigen binding portions thereof, may also be combined with agents such as sulfasalazine, 5-aminosalicylic acid and olsalazine, and agents which interfere with synthesis or action of proinflammatory cytokines such as IL-1, for example, IL-1β converting enzyme inhibitors and IL-1ra. Antibodies of the invention or antigen binding portion thereof may also be used with T cell signaling inhibitors, for example, tyrosine kinase inhibitors 6-mercaptopurines. Binding proteins of the invention, or antigen binding portions thereof, can be combined with IL-11. Binding proteins of the invention, or antigen binding portions thereof, can be combined with mesalamine, prednisone, azathioprine, mercaptopurine, infliximab, methylprednisolone sodium succinate, diphenoxylate/atrop sulfate, loperamide hydrochloride, methotrexate, omeprazole, folate, ciprofloxacin/dextrose-water, hydrocodone bitartrate/apap, tetracycline hydrochloride, fluocinonide, metronidazole, thimerosal/boric acid, cholestyramine/sucrose, ciprofloxacin hydrochloride, hyoscyamine sulfate, meperidine hydrochloride, midazolam hydrochloride, oxycodone hcl/acetaminophen, promethazine hydrochloride, sodium phosphate, sulfamethoxazole/trimethoprim, celecoxib, polycarbophil, propoxyphene napsylate, hydrocortisone, multivitamins, balsalazide disodium, codeine phosphate/apap, colesevelam hcl, cyanocobalamin, folic acid, levofloxacin, methylprednisolone, natalizumab and interferon-gamma

[0362] Non-limiting examples of therapeutic agents for multiple sclerosis with which binding proteins of the invention can be combined include the following: corticosteroids; prednisolone; methylprednisolone; azathioprine; cyclophosphamide; cyclosporine; methotrexate; 4-aminopyridine; tizanidine; interferon-β1a (AVONEX; Biogen); interferon-β1b (BETASERON; Chiron/Berlex); interferon α-n3) (Interferon Sciences/Fujimoto), interferon-α (Alfa Wassermann/J&J), interferon β1A-IF (Serono/Inhale Therapeutics), Peginterferon a 2b (Enzon/Schering-Plough), Copolymer 1 (Cop-1; COPAXONE; Teva Pharmaceutical Industries, Inc.); hyperbaric oxygen; intravenous immunoglobulin; clabribine; antibodies to or antagonists of other human cytokines or growth factors and their receptors, for example, TNF, LT, IL-1, IL-2, IL-6, IL-7, IL-8, IL-23, IL-15, IL-16, IL-18, EMAP-II, GM-CSF, FGF, and PDGF. Binding proteins of the invention can be combined with antibodies to cell surface molecules such as CD2, CD3, CD4, CD8, CD19, CD20, CD25, CD28, CD30, CD40, CD45, CD69, CD80, CD86, CD90 or their ligands. Binding proteins of the invention, may also be combined with agents, such as methotrexate, cyclosporine, FK506, rapamycin, mycophenolate mofetil, leflunomide, NSAIDs, for example, ibuprofen, corticosteroids such as prednisolone, phosphodiesterase inhibitors, adensosine agonists, antithrombotic agents, complement inhibitors, adrenergic agents, agents which interfere with signalling by proinflammatory cytokines such as TNFα or IL-1 (e.g.,IRAK, NIK, IKK, p38 or MAP kinase inhibitors), IL-1β converting enzyme inhibitors, TACE inhibitors, T-cell signaling inhibitors such as kinase inhibitors, metalloproteinase inhibitors, sulfasalazine, azathioprine, 6-mercaptopurines, angiotensin converting enzyme inhibitors, soluble cytokine receptors and derivatives thereof (e.g., soluble p55 or p75 TNF receptors, sIL-1R1, sIL-1R11, sIL-6R), antiinflammatory cytokines (e.g.,IL-4, IL-10, IL-13 and TGFβ) and bcl-2 inhibitors.

[0363] Examples of therapeutic agents for multiple sclerosis in which binding proteins of the invention can be combined include interferon-β, for example, IFNβ1a and IFNβ1b; copaxone, corticosteroids, caspase inhibitors, for example inhibitors of caspase-1, IL-1 inhibitors, TNF inhibitors, and antibodies to CD40 ligand and CD80.

[0364] The binding proteins of the invention, may also be combined with agents, such as alemtuzumab, dronabinol, Unimed, daclizumab, mitoxantrone, xaliproden hydrochloride, fampridine, glatiramer acetate, natalizumab, sinnabidol, a-immunokine NNSO3, ABR-215062, AnergiX.MS, chemokine receptor antagonists, BBR-2778, calagualine, CPI-1189, LEM (liposome encapsulated mitoxantrone), THC.CBD (cannabinoid agonist) MBP-8298, mesopram (PDE4 inhibitor), MNA-715, anti-IL-6 receptor antibody, neurovax, pirfenidone allotrap 1258 (RDP-1258), sTNF-R1, talampanel, teriflunomide, TGF-beta2, tiplimotide, VLA-4 antagonists (for example, TR-14035, VLA4 Ultrahaler, Antegran-ELAN/Biogen), interferon gamma antagonists, IL-4 agonists.

[0365] Non-limiting examples of therapeutic agents for Angina with which binding proteins of the invention can be combined include the following: aspirin, nitroglycerin, isosorbide mononitrate, metoprolol succinate, atenolol, metoprolol tartrate, amlodipine besylate, diltiazem hydrochloride, isosorbide dinitrate, clopidogrel bisulfate, nifedipine, atorvastatin calcium, potassium chloride, furosemide, simvastatin, verapamil hcl, digoxin, propranolol hydrochloride, carvedilol, lisinopril, spironolactone, hydrochlorothiazide, enalapril maleate, nadolol, ramipril, enoxaparin sodium, heparin sodium, valsartan, sotalol hydrochloride, fenofibrate, ezetimibe, bumetanide, losartan potassium, lisinopril/hydrochlorothiazide, felodipine, captopril, bisoprolol fumarate.

[0366] Non-limiting examples of therapeutic agents for Ankylosing Spondylitis with which binding proteins of the invention can be combined include the following: ibuprofen, diclofenac and misoprostol, naproxen, meloxicam, indomethacin, diclofenac, celecoxib, rofecoxib, Sulfasalazine, Methotrexate, azathioprine, minocyclin, prednisone, etanercept, infliximab.

[0367] Non-limiting examples of therapeutic agents for Asthma with which binding proteins of the invention can be combined include the following: albuterol, salmeterol/fluticasone, montelukast sodium, fluticasone propionate, budesonide, prednisone, salmeterol xinafoate, levalbuterol hcl, albuterol sulfate/ipratropium, prednisolone sodium phosphate, triamcinolone acetonide, beclomethasone dipropionate, ipratropium bromide, azithromycin, pirbuterol acetate, prednisolone, theophylline anhydrous, methylprednisolone sodium succinate, clarithromycin, zafirlukast, formoterol fumarate, influenza virus vaccine, methylprednisolone, amoxicillin trihydrate, flunisolide, allergy injection, cromolyn sodium, fexofenadine hydrochloride, flunisolide/menthol, amoxicillin/clavulanate, levofloxacin, inhaler assist device, guaifenesin, dexamethasone sodium phosphate, moxifloxacin hcl, doxycycline hyclate, guaifenesin/d-methorphan, p-ephedrine/cod/chlorphenir, gatifloxacin, cetirizine hydrochloride, mometasone furoate, salmeterol xinafoate, benzonatate, cephalexin, pe/hydrocodone/chlorphenir, cetirizine hcl/pseudoephed, phenylephrine/cod/promethazine, codeine/promethazine, cefprozil, dexamethasone, guaifenesin/pseudoephedrine, chlorpheniramine/hydrocodone, nedocromil sodium, terbutaline sulfate, epinephrine, methylprednisolone, metaproterenol sulfate.

[0368] Non-limiting examples of therapeutic agents for COPD with which binding proteins of the invention can be combined include the following: albuterol sulfate/ipratropium, ipratropium bromide, salmeterol/fluticasone, albuterol, salmeterol xinafoate, fluticasone propionate, prednisone, theophylline anhydrous, methylprednisolone sodium succinate, montelukast sodium, budesonide, formoterol fumarate, triamcinolone acetonide, levofloxacin, guaifenesin, azithromycin, beclomethasone dipropionate, levalbuterol hcl, flunisolide, ceftriaxone sodium, amoxicillin trihydrate, gatifloxacin, zafirlukast, amoxicillin/clavulanate, flunisolide/menthol, chlorpheniramine/hydrocodone, metaproterenol sulfate, methylprednisolone, mometasone furoate, p-ephedrine/cod/chlorphenir, pirbuterol acetate, p-ephedrine/loratadine, terbutaline sulfate, tiotropium bromide, (R,R)-formoterol, TgAAT, Cilomilast, Roflumilast.

[0369] Non-limiting examples of therapeutic agents for HCV with which binding proteins of the invention can be combined include the following: Interferon-alpha-2a, Interferon-alpha-2b, Interferon-alpha con1, Interferon-alpha-n1, Pegylated interferon-alpha-2a, Pegylated interferon-alpha-2b, ribavirin, Peginterferon alfa-2b+ribavirin, Ursodeoxycholic Acid, Glycyrrhizic Acid, Thymalfasin, Maxamine, VX-497 and any compounds that are used to treat HCV through intervention with the following targets: HCV polymerase, HCV protease, HCV helicase, HCV IRES (internal ribosome entry site).

[0370] Non-limiting examples of therapeutic agents for Idiopathic Pulmonary Fibrosis with which binding proteins of the invention can be combined include the following: prednisone, azathioprine, albuterol, colchicine, albuterol sulfate, digoxin, gamma interferon, methylprednisolone sod succ, lorazepam, furosemide, lisinopril, nitroglycerin, spironolactone, cyclophosphamide, ipratropium bromide, actinomycin d, alteplase, fluticasone propionate, levofloxacin, metaproterenol sulfate, morphine sulfate, oxycodone hcl, potassium chloride, triamcinolone acetonide, tacrolimus anhydrous, calcium, interferon-alpha, methotrexate, mycophenolate mofetil, Interferon-gamma-1β.

[0371] Non-limiting examples of therapeutic agents for Myocardial Infarction with which binding proteins of the invention can be combined include the following: aspirin, nitroglycerin, metoprolol tartrate, enoxaparin sodium, heparin sodium, clopidogrel bisulfate, carvedilol, atenolol, morphine sulfate, metoprolol succinate, warfarin sodium, lisinopril, isosorbide mononitrate, digoxin, furosemide, simvastatin, ramipril, tenecteplase, enalapril maleate, torsemide, retavase, losartan potassium, quinapril hcl/mag carb, bumetanide, alteplase, enalaprilat, amiodarone hydrochloride, tirofiban hcl m-hydrate, diltiazem hydrochloride, captopril, irbesartan, valsartan, propranolol hydrochloride, fosinopril sodium, lidocaine hydrochloride, eptifibatide, cefazolin sodium, atropine sulfate, aminocaproic acid, spironolactone, interferon, sotalol hydrochloride, potassium chloride, docusate sodium, dobutamine hcl, alprazolam, pravastatin sodium, atorvastatin calcium, midazolam hydrochloride, meperidine hydrochloride, isosorbide dinitrate, epinephrine, dopamine hydrochloride, bivalirudin, rosuvastatin, ezetimibe/simvastatin, avasimibe, cariporide.

[0372] Non-limiting examples of therapeutic agents for Psoriasis with which binding proteins of the invention can be combined include the following: small molecule inhibitor of KDR, small molecule inhibitor of Tie-2, calcipotriene, clobetasol propionate, triamcinolone acetonide, halobetasol propionate, tazarotene, methotrexate, fluocinonide, betamethasone diprop augmented, fluocinolone acetonide, acitretin, tar shampoo, betamethasone valerate, mometasone furoate, ketoconazole, pramoxine/fluocinolone, hydrocortisone valerate, flurandrenolide, urea, betamethasone, clobetasol propionate/emoll, fluticasone propionate, azithromycin, hydrocortisone, moisturizing formula, folic acid, desonide, pimecrolimus, coal tar, diflorasone diacetate, etanercept folate, lactic acid, methoxsalen, hc/bismuth subgal/znox/resor, methylprednisolone acetate, prednisone, sunscreen, halcinonide, salicylic acid, anthralin, clocortolone pivalate, coal extract, coal tar/salicylic acid, coal tar/salicylic acid/sulfur, desoximetasone, diazepam, emollient, fluocinonide/emollient, mineral oil/castor oil/na lact, mineral oil/peanut oil, petroleum/isopropyl myristate, psoralen, salicylic acid, soap/tribromsalan, thimerosal/boric acid, celecoxib, infliximab, cyclosporine, alefacept, efalizumab, tacrolimus, pimecrolimus, PUVA, UVB, sulfasalazine.

[0373] Non-limiting examples of therapeutic agents for Psoriatic Arthritis with which binding proteins of the invention can be combined include the following: methotrexate, etanercept, rofecoxib, celecoxib, folic acid, sulfasalazine, naproxen, leflunomide, methylprednisolone acetate, indomethacin, hydroxychloroquine sulfate, prednisone, sulindac, betamethasone diprop augmented, infliximab, methotrexate, folate, triamcinolone acetonide, diclofenac, dimethylsulfoxide, piroxicam, diclofenac sodium, ketoprofen, meloxicam, methylprednisolone, nabumetone, tolmetin sodium, calcipotriene, cyclosporine, diclofenac sodium/misoprostol, fluocinonide, glucosamine sulfate, gold sodium thiomalate, hydrocodone bitartrate/apap, ibuprofen, risedronate sodium, sulfadiazine, thioguanine, valdecoxib, alefacept, efalizumab and bcl-2 inhibitors.

[0374] Non-limiting examples of therapeutic agents for Restenosis with which binding proteins of the invention can be combined include the following: sirolimus, paclitaxel, everolimus, tacrolimus, Zotarolimus, acetaminophen.

[0375] Non-limiting examples of therapeutic agents for Sciatica with which binding proteins of the invention can be combined include the following: hydrocodone bitartrate/apap, rofecoxib, cyclobenzaprine hcl, methylprednisolone, naproxen, ibuprofen, oxycodone hcl/acetaminophen, celecoxib, valdecoxib, methylprednisolone acetate, prednisone, codeine phosphate/apap, tramadol hcl/acetaminophen, metaxalone, meloxicam, methocarbamol, lidocaine hydrochloride, diclofenac sodium, gabapentin, dexamethasone, carisoprodol, ketorolac tromethamine, indomethacin, acetaminophen, diazepam, nabumetone, oxycodone hcl, tizanidine hcl, diclofenac sodium/misoprostol, propoxyphene napsylate/apap, asa/oxycod/oxycodone ter, ibuprofen/hydrocodone bit, tramadol hcl, etodolac, propoxyphene hcl, amitriptyline hcl, carisoprodol/codeine phos/asa, morphine sulfate, multivitamins, naproxen sodium, orphenadrine citrate, temazepam.

[0376] Examples of therapeutic agents for SLE (Lupus) in which binding proteins of the invention can be combined include the following: NSAIDS, for example, diclofenac, naproxen, ibuprofen, piroxicam, indomethacin; COX2 inhibitors, for example, Celecoxib, rofecoxib, valdecoxib; anti-malarials, for example, hydroxychloroquine; Steroids, for example, prednisone, prednisolone, budenoside, dexamethasone; Cytotoxics, for example, azathioprine, cyclophosphamide, mycophenolate mofetil, methotrexate; inhibitors of PDE4 or purine synthesis inhibitor, for example Cellcept. Binding proteins of the invention, may also be combined with agents such as sulfasalazine, 5-aminosalicylic acid, olsalazine, Imuran and agents which interfere with synthesis, production or action of proinflammatory cytokines such as IL-1, for example, caspase inhibitors like IL-1β converting enzyme inhibitors and IL-1ra. Binding proteins of the invention may also be used with T cell signaling inhibitors, for example, tyrosine kinase inhibitors; or molecules that target T cell activation molecules, for example, CTLA-4-IgG or anti-B7 family antibodies, anti-PD-1 family antibodies. Binding proteins of the invention, can be combined with IL-11 or anti-cytokine antibodies, for example, fonotolizumab (anti-IFNg antibody), or anti-receptor receptor antibodies, for example, anti-IL-6 receptor antibody and antibodies to B-cell surface molecules. Antibodies of the invention or antigen binding portion thereof may also be used with LJP 394 (abetimus), agents that deplete or inactivate B-cells, for example, Rituximab (anti-CD20 antibody), lymphostat-B (anti-BlyS antibody), TNF antagonists, for example, anti-TNF antibodies, Adalimumab (PCT Publication No. WO 97/29131; HUMIRA), CA2 (REMICADE), CDP 571, TNFR-Ig constructs, (p75TNFRIgG (ENBREL) and p55TNFRIgG (LENERCEPT)) and bcl-2 inhibitors, because bcl-2 overexpression in transgenic mice has been demonstrated to cause a lupus like phenotype (see Marquina, Regina et al., Journal of Immunology (2004), 172(11), 7177-7185), therefore inhibition is expected to have therapeutic effects.

[0377] The pharmaceutical compositions of the invention may include a “therapeutically effective amount” or a “prophylactically effective amount” of a binding protein of the invention. A “therapeutically effective amount” refers to an amount effective, at dosages and for periods of time necessary, to achieve the desired therapeutic result. A therapeutically effective amount of the binding protein may be determined by a person skilled in the art and may vary according to factors such as the disease state, age, sex, and weight of the individual, and the ability of the binding protein to elicit a desired response in the individual. A therapeutically effective amount is also one in which any toxic or detrimental effects of the antibody, or antibody portion, are outweighed by the therapeutically beneficial effects. A “prophylactically effective amount” refers to an amount effective, at dosages and for periods of time necessary, to achieve the desired prophylactic result. Typically, since a prophylactic dose is used in subjects prior to or at an earlier stage of disease, the prophylactically effective amount will be less than the therapeutically effective amount.

[0378] Dosage regimens may be adjusted to provide the optimum desired response (e.g., a therapeutic or prophylactic response). For example, a single bolus may be administered, several divided doses may be administered over time or the dose may be proportionally reduced or increased as indicated by the exigencies of the therapeutic situation. It is especially advantageous to formulate parenteral compositions in dosage unit form for ease of administration and uniformity of dosage. Dosage unit form as used herein refers to physically discrete units suited as unitary dosages for the mammalian subjects to be treated; each unit containing a predetermined quantity of active compound calculated to produce the desired therapeutic effect in association with the required pharmaceutical carrier. The specification for the dosage unit forms of the invention are dictated by and directly dependent on (a) the unique characteristics of the active compound and the particular therapeutic or prophylactic effect to be achieved, and (b) the limitations inherent in the art of compounding such an active compound for the treatment of sensitivity in individuals.

[0379] An exemplary, non-limiting range for a therapeutically or prophylactically effective amount of a binding protein of the invention is 0.1-20 mg/kg, for example, 1-10 mg/kg. It is to be noted that dosage values may vary with the type and severity of the condition to be alleviated. It is to be further understood that for any particular subject, specific dosage regimens should be adjusted over time according to the individual need and the professional judgment of the person administering or supervising the administration of the compositions, and that dosage ranges set forth herein are exemplary only and are not intended to limit the scope or practice of the claimed composition.

[0380] It will be readily apparent to those skilled in the art that other suitable modifications and adaptations of the methods of the invention described herein are obvious and may be made using suitable equivalents without departing from the scope of the invention or the embodiments disclosed herein. Having now described the present invention in detail, the same will be more clearly understood by reference to the following examples, which are included for purposes of illustration only and are not intended to be limiting of the invention.

### EXAMPLES

### Example 1

### Design, Construction, and Analysis of a DVD-Ig

### Example 1.1

### Assays Used to Identify and Characterize Parent Antibodies and DVD-Ig

[0381] The following assays are used throughout the Examples to identify and characterize parent antibodies and DVD-Ig unless otherwise stated.

### Example 1.1.1

### Assays Used To Determine Binding and Affinity of Parent Antibodies and DVD-Ig for Their Target Antigen(s)

### Example 1.1.1.A

### ELISA

[0382] Enzyme Linked Immunosorbent Assays to screen for antibodies that bind a desired target antigen are performed as follows. ELISA plates (Corning Costar, Acton, Mass.) are coated with 50 μL/well of 5 μg/ml goat anti-mouse IgG Fc specific (Pierce #31170, Rockford, Ill.) in Phosphate Buffered Saline (PBS) overnight at 4° C. Plates are washed once with PBS containing 0.05% Tween-20. Plates are blocked by addition of 200 μL/well blocking solution diluted to 2% in PBS (BioRad #170-6404, Hercules, Calif.) for 1 hour at room temperature. Plates are washed once after blocking with PBS containing 0.05% Tween-20.

[0383] Fifty microliters per well of, e.g., mouse sera, hybridoma supernatants, or antibody or DVD-Ig preparations diluted in PBS containing 0.1% Bovine Serum Albumin (BSA) (Sigma, St. Louis, Mo.) is added to the ELISA plate prepared as described above and incubated for 1 hour at room temperature. Wells are washed three times with PBS containing 0.05% Tween-20. Fifty microliters of biotinylated recombinant purified target antigen diluted to 100 ng/mL in PBS containing 0.1% BSA is added to each well and incubated for 1 hour at room temperature. Plates are washed 3 times with PBS containing 0.05% Tween-20. Streptavidin HRP (Pierce #21126, Rockland, Ill.) is diluted 1:20000 in PBS containing 0.1% BSA; 50 μL/well is added and the plates incubated for 1 hour at room temperature. Plates are washed 3 times with PBS containing 0.05% Tween-20. Fifty microliters of TMB solution (Sigma #T0440, St. Louis, Mo.) is added to each well and incubated for 10 minutes at room temperature. The reaction is stopped by addition of 1N sulphuric acid. Plates are read spectrophotmetrically at a wavelength of 450 nm. Results are shown in Table 3.

TABLE 3
Direct Bind ELISA Of 104 DVD Constructs With EGFR (seq. 2) Combined With
Other Sequences With Various Orientations And Linker Lengths

| | | | | N- | | | | | | C- |
|---|---|---|---|---|---|---|---|---|---|---|
| | | N- | | Term. | | | | C- | | Term. |
| | | Term. | N- | Ref. | | | | Term. | C- | Ref. |
| | | VD | Term. | Ab. | | | | VD | Term. | Ab. |
| DVD-Ig | N-Term. VD | EC50 | Ref. | EC50 | HC | LC | C-Term. VD | EC50 | Ref. | EC50 |
| ID | Sequence ID | (nM) | Ab. ID | (nM) | linker | linker | Sequence ID | (nM) | Ab. ID | (nM) |
| DVD321 | EGFR (seq. 2) | 6.83 | AB064 | 3.63 | S | S | EGFR (seq. 1) | 6.83 | AB033 | 1.8 |
| DVD322 | EGFR (seq. 1) | 1.59 | AB033 | 1.67 | S | S | EGFR (seq. 2) | 1.59 | AB064 | 3.63 |
| DVD325 | EGFR (seq. 2) | 5.96 | AB064 | 6.86 | S | S | RON | 24.99 | AB005 | 0.19 |
| DVD326 | RON | 0.18 | AB005 | 0.24 | S | S | EGFR (seq. 2) | 29.93 | AB064 | 8.83 |
| DVD327 | EGFR (seq. 2) | 3.98 | AB064 | 3.45 | S | S | ErbB3 (seq. 1) | 485.26 | AB062 | 1.19 |
| DVD328 | ErbB3 (seq. 1) | 1.14 | AB062 | 1.34 | S | S | EGFR (seq. 2) | 94.89 | AB064 | 3.83 |
| DVD329 | EGFR (seq. 2) | 3.82 | AB064 | 4.37 | S | S | ErbB3 (seq. 2) | 481.28 | AB063 | 0.86 |
| DVD330 | ErbB3 (seq. 2) | 1.29 | AB063 | 1.11 | S | S | EGFR (seq. 2) | 224.44 | AB064 | 4.17 |
| DVD331 | EGFR (seq. 2) | 3.68 | AB064 | 3.89 | S | S | CD3 | N/A | AB002 | N/A |
| DVD332 | CD3 | N/A | AB002 | N/A | S | S | EGFR (seq. 2) | 62.09 | AB064 | 3.95 |
| DVD333 | EGFR (seq. 2) | 3.55 | AB064 | 4.46 | S | S | IGF1R | 78.58 | AB011 | 0.24 |
| DVD334 | IGF1R | 0.19 | AB011 | 0.26 | S | S | EGFR (seq. 2) | 137.12 | AB064 | 4.28 |
| DVD335 | EGFR (seq. 2) | 3.77 | AB064 | 5.03 | S | S | HGF | 159.04 | AB012 | 0.15 |
| DVD336 | HGF | 0.15 | AB012 | 0.19 | S | S | EGFR (seq. 2) | 332.05 | AB064 | 5.40 |
| DVD337 | EGFR (seq. 2) | 6.5 | AB064 | 6.73 | S | S | VEGF (seq. 1) | 0.57 | AB014 | 0.25 |
| DVD338 | VEGF (seq. 1) | 0.24 | AB014 | 0.26 | S | S | EGFR (seq. 2) | 205.54 | AB064 | 7.84 |
| DVD339 | EGFR (seq. 2) | 5.1 | AB064 | 3.66 | S | S | DLL-4 | 4.01 | AB015 | 0.45 |
| DVD340 | DLL-4 | 0.32 | AB015 | 0.40 | S | S | EGFR (seq. 2) | 189.14 | AB064 | 3.8 |
| DVD341 | EGFR (seq. 2) | 3.41 | AB064 | 4.39 | S | S | PLGF | 0.74 | AB047 | 0.21 |
| DVD342 | PLGF | 0.2 | AB047 | 0.25 | S | S | EGFR (seq. 2) | 119.88 | AB064 | 3.77 |
| DVD755 | EGFR (seq. 2) | 3.26 | AB064 | 4.78 | S | S | ErbB3 (seq. 3) | 27.68 | AB067 | 1.40 |
| DVD756 | ErbB3 (seq. 3) | 3.94 | AB067 | 2.03 | S | S | EGFR (seq. 2) | 48.87 | AB064 | 3.48 |
| DVD757 | EGFR (seq. 2) | 14.51 | AB064 | 10.69 | S | S | VEGF (seq. 2) | 528.26 | AB070 | 5.12 |
| DVD758 | VEGF (seq. 2) | 5.37 | AB070 | 5.91 | S | S | EGFR (seq. 2) | 561.59 | AB064 | 9.11 |
| DVD759 | EGFR (seq. 2) | 7.01 | AB064 | 10.25 | S | S | VEGF (seq. 3) | 127.91 | AB071 | 1.68 |
| DVD760 | VEGF (seq. 3) | 0.77 | AB071 | 1.57 | S | S | EGFR (seq. 2) | 328.03 | AB064 | 12.93 |
| DVD765 | EGFR (seq. 2) | 4.48 | AB064 | 3.63 | L | L | EGFR (seq. 1) | 4.48 | AB033 | 1.67 |
| DVD766 | EGFR (seq. 1) | 3.12 | AB033 | 1.8 | L | L | EGFR (seq. 2) | 3.12 | AB064 | 3.63 |
| DVD767 | EGFR (seq. 2) | 5.97 | AB064 | 6.86 | L | L | RON | 0.64 | AB005 | 0.19 |
| DVD768 | RON | 0.18 | AB005 | 0.24 | L | L | EGFR (seq. 2) | 20.67 | AB064 | 8.83 |
| DVD769 | EGFR (seq. 2) | 3.59 | AB064 | 3.45 | L | L | ErbB3 (seq. 1) | 8.23 | AB062 | 1.19 |
| DVD770 | ErbB3 (seq. 1) | 1.55 | AB062 | 1.36 | L | L | EGFR (seq. 2) | 15.24 | AB064 | 6.86 |
| DVD771 | EGFR (seq. 2) | 4.43 | AB064 | 4.37 | L | L | ErbB3 (seq. 2) | 1.38 | AB063 | 0.86 |
| DVD772 | ErbB3 (seq. 2) | 31.42 | AB063 | 1.11 | L | L | EGFR (seq. 2) | 77.19 | AB064 | 4.17 |
| DVD773 | EGFR (seq. 2) | 4.96 | AB064 | 3.89 | L | L | CD3 | N/A | AB002 | N/A |
| DVD774 | CD3 | N/A | AB002 | N/A | L | L | EGFR (seq. 2) | 19.29 | AB064 | 3.95 |
| DVD775 | EGFR (seq. 2) | 3.59 | AB064 | 4.46 | L | L | IGF1R | 2.77 | AB011 | 0.24 |
| DVD776 | IGF1R | 0.83 | AB011 | 0.26 | L | L | EGFR (seq. 2) | 286.41 | AB064 | 4.28 |
| DVD777 | EGFR (seq. 2) | 5.13 | AB064 | 5.03 | L | L | HGF | 0.96 | AB012 | 0.15 |
| DVD778 | HGF | 0.17 | AB012 | 0.19 | L | L | EGFR (seq. 2) | 50.3 | AB064 | 5.40 |
| DVD779 | EGFR (seq. 2) | 10.57 | AB064 | 6.73 | L | L | VEGF (seq. 1) | 0.24 | AB014 | 0.25 |
| DVD780 | VEGF (seq. 1) | 2.19 | AB014 | 0.26 | L | L | EGFR (seq. 2) | 408.7 | AB064 | 7.84 |
| DVD781 | EGFR (seq. 2) | 4.19 | AB064 | 3.66 | L | L | DLL-4 | 0.42 | AB015 | 0.45 |
| DVD782 | DLL-4 | 0.37 | AB015 | 0.40 | L | L | EGFR (seq. 2) | 55.24 | AB064 | 3.8 |
| DVD783 | EGFR (seq. 2) | 3.88 | AB064 | 4.39 | L | L | PLGF | 0.36 | AB047 | 0.21 |
| DVD784 | PLGF | 0.26 | AB047 | 0.25 | L | L | EGFR (seq. 2) | 41.36 | AB064 | 3.77 |
| DVD787 | EGFR (seq. 2) | 3.78 | AB064 | 4.78 | L | L | ErbB3 (seq. 3) | 14.38 | AB067 | 1.40 |
| DVD788 | ErbB3 (seq. 3) | 3.14 | AB067 | 2.03 | L | L | EGFR (seq. 2) | 18.04 | AB064 | 3.48 |
| DVD789 | EGFR (seq. 2) | 14.61 | AB064 | 10.69 | L | L | VEGF (seq. 2) | 45.95 | AB070 | 5.12 |
| DVD790 | VEGF (seq. 2) | 15.91 | AB070 | 5.91 | L | L | EGFR (seq. 2) | 76.76 | AB064 | 9.11 |
| DVD791 | EGFR (seq. 2) | 8.24 | AB064 | 10.25 | L | L | VEGF (seq. 3) | 11.62 | AB071 | 1.68 |
| DVD792 | VEGF (seq. 3) | 0.82 | AB071 | 1.57 | L | L | EGFR (seq. 2) | 48.61 | AB064 | 12.93 |
| DVD795 | EGFR (seq. 2) | 6.21 | AB064 | 3.63 | L | S | EGFR (seq. 1) | 6.21 | AB033 | 1.67 |
| DVD796 | EGFR (seq. 1) | 1.94 | AB033 | 1.8 | L | S | EGFR (seq. 2) | 1.94 | AB064 | 3.63 |
| DVD797 | EGFR (seq. 2) | 4.56 | AB064 | 6.86 | L | S | RON | 1.16 | AB005 | 0.19 |
| DVD798 | RON | 0.18 | AB005 | 0.24 | L | S | EGFR (seq. 2) | 17.94 | AB064 | 8.83 |
| DVD799 | EGFR (seq. 2) | 5.76 | AB064 | 3.45 | L | S | ErbB3 (seq. 1) | 20.04 | AB062 | 1.19 |
| DVD800 | ErbB3 (seq. 1) | 2.06 | AB062 | 1.34 | L | S | EGFR (seq. 2) | 67.26 | AB064 | 3.83 |
| DVD801 | EGFR (seq. 2) | 3.91 | AB064 | 4.37 | L | S | ErbB3 (seq. 2) | 3.28 | AB063 | 0.86 |
| DVD802 | ErbB3 (seq. 2) | 11.13 | AB063 | 1.11 | L | S | EGFR (seq. 2) | 726.39 | AB064 | 4.17 |
| DVD803 | EGFR (seq. 2) | 0.23 | AB064 | 3.89 | L | S | CD3 | N/A | AB002 | N/A |
| DVD804 | CD3 | N/A | AB002 | N/A | L | S | EGFR (seq. 2) | 157.62 | AB064 | 3.95 |
| DVD805 | EGFR (seq. 2) | 0.48 | AB064 | 4.46 | L | S | IGF1R | 0.99 | AB011 | 0.24 |
| DVD806 | IGF1R | 0.4 | AB011 | 0.26 | L | S | EGFR (seq. 2) | 53.79 | AB064 | 4.28 |
| DVD807 | EGFR (seq. 2) | 4.85 | AB064 | 5.03 | L | S | HGF | 9.24 | AB012 | 0.15 |
| DVD808 | HGF | 0.14 | AB012 | 0.19 | L | S | EGFR (seq. 2) | 96.36 | AB064 | 5.40 |
| DVD809 | EGFR (seq. 2) | 7.34 | AB064 | 6.73 | L | S | VEGF (seq. 1) | 0.23 | AB014 | 0.25 |
| DVD810 | VEGF (seq. 1) | 0.33 | AB014 | 0.26 | L | S | EGFR (seq. 2) | 227.99 | AB064 | 7.84 |
| DVD811 | EGFR (seq. 2) | 3.45 | AB064 | 3.66 | L | S | DLL-4 | 0.99 | AB015 | 0.45 |
| DVD812 | DLL-4 | 0.39 | AB015 | 0.40 | L | S | EGFR (seq. 2) | 77.26 | AB064 | 3.8 |
| DVD813 | EGFR (seq. 2) | 3.41 | AB064 | 4.39 | L | S | PLGF | 0.44 | AB047 | 0.21 |
| DVD814 | PLGF | 0.23 | AB047 | 0.25 | L | S | EGFR (seq. 2) | 50.43 | AB064 | 3.77 |
| DVD817 | EGFR (seq. 2) | 5.33 | AB064 | 4.78 | L | S | ErbB3 (seq. 3) | 18.82 | AB067 | 1.40 |
| DVD818 | ErbB3 (seq. 3) | 3.32 | AB067 | 2.03 | L | S | EGFR (seq. 2) | 19.32 | AB064 | 3.48 |
| DVD819 | EGFR (seq. 2) | 12.2 | AB064 | 10.69 | L | S | VEGF (seq. 2) | 36.35 | AB070 | 5.12 |
| DVD820 | VEGF (seq. 2) | 4.08 | AB070 | 5.91 | L | S | EGFR (seq. 2) | 106.81 | AB064 | 9.11 |
| DVD821 | EGFR (seq. 2) | 6.96 | AB064 | 10.25 | L | S | VEGF (seq. 3) | 11.09 | AB071 | 1.68 |
| DVD822 | VEGF (seq. 3) | 0.72 | AB071 | 1.57 | L | S | EGFR (seq. 2) | 90.03 | AB064 | 12.93 |
| DVD825 | EGFR (seq. 2) | 1.67 | AB064 | 3.63 | S | L | EGFR (seq. 1) | 1.67 | AB033 | 1.67 |
| DVD826 | EGFR (seq. 1) | 2.27 | AB033 | 1.8 | S | L | EGFR (seq. 2) | 2.27 | AB064 | 3.63 |
| DVD827 | EGFR (seq. 2) | 6.28 | AB064 | 6.86 | S | L | RON | 6.57 | AB005 | 0.19 |
| DVD828 | RON | 0.2 | AB005 | 0.24 | S | L | EGFR (seq. 2) | 19.83 | AB064 | 8.83 |
| DVD829 | EGFR (seq. 2) | 3.81 | AB064 | 3.45 | S | L | ErbB3 (seq. 1) | 41.4 | AB062 | 1.19 |
| DVD830 | ErbB3 (seq. 1) | 1.43 | AB062 | 1.34 | S | L | EGFR (seq. 2) | 42.71 | AB064 | 3.83 |
| DVD831 | EGFR (seq. 2) | 4.6 | AB064 | 4.37 | S | L | ErbB3 (seq. 2) | 1.42 | AB063 | 0.86 |
| DVD832 | ErbB3 (seq. 2) | 1.19 | AB063 | 1.11 | S | L | EGFR (seq. 2) | 62.39 | AB064 | 4.17 |
| DVD833 | EGFR (seq. 2) | 3.03 | AB064 | 3.89 | S | L | CD3 | N/A | AB002 | N/A |
| DVD834 | CD3 | N/A | AB002 | N/A | S | L | EGFR (seq. 2) | 26.7 | AB064 | 3.95 |
| DVD835 | EGFR (seq. 2) | 2.42 | AB064 | 4.46 | S | L | IGF1R | 3.47 | AB011 | 0.24 |
| DVD836 | IGF1R | 0.51 | AB011 | 0.26 | S | L | EGFR (seq. 2) | 56.83 | AB064 | 4.28 |
| DVD837 | EGFR (seq. 2) | 4.51 | AB064 | 5.03 | S | L | HGF | 1.29 | AB012 | 0.15 |
| DVD838 | HGF | 0.19 | AB012 | 0.19 | S | L | EGFR (seq. 2) | 57.66 | AB064 | 5.40 |
| DVD839 | EGFR (seq. 2) | 12.53 | AB064 | 6.73 | S | L | VEGF (seq. 1) | 0.26 | AB014 | 0.25 |
| DVD840 | VEGF (seq. 1) | 0.18 | AB014 | 0.26 | S | L | EGFR (seq. 2) | 69.77 | AB064 | 7.84 |
| DVD841 | EGFR (seq. 2) | 4.06 | AB064 | 3.66 | S | L | DLL-4 | 0.55 | AB015 | 0.45 |
| DVD842 | DLL-4 | 0.36 | AB015 | 0.40 | S | L | EGFR (seq. 2) | 51.68 | AB064 | 3.8 |
| DVD843 | EGFR (seq. 2) | 3.65 | AB064 | 4.39 | S | L | PLGF | 0.37 | AB047 | 0.21 |
| DVD844 | PLGF | 0.23 | AB047 | 0.25 | S | L | EGFR (seq. 2) | 45.51 | AB064 | 3.77 |
| DVD847 | EGFR (seq. 2) | 2.92 | AB064 | 4.78 | S | L | ErbB3 (seq. 3) | 12.93 | AB067 | 1.40 |
| DVD848 | ErbB3 (seq. 3) | 3.23 | AB067 | 2.03 | S | L | EGFR (seq. 2) | 16.74 | AB064 | 3.48 |
| DVD849 | EGFR (seq. 2) | 12.33 | AB064 | 10.69 | S | L | VEGF (seq. 2) | 59.58 | AB070 | 5.12 |
| DVD850 | VEGF (seq. 2) | 10.17 | AB070 | 5.91 | S | L | EGFR (seq. 2) | 71.83 | AB064 | 9.11 |
| DVD851 | EGFR (seq. 2) | 9.36 | AB064 | 10.25 | S | L | VEGF (seq. 3) | 28.44 | AB071 | 1.68 |
| DVD852 | VEGF (seq. 3) | 0.78 | AB071 | 1.57 | S | L | EGFR (seq. 2) | 68.11 | AB064 | 12.93 |

[0384] Binding of all DVD-Ig constructs was maintained and comparable to parent antibodies. All N-terminal variable domains bound with a similar high affinity as the parent antibody as well as the C-terminal variable domains of DVD-Ig constructs DVD322, DVD337, DVD341, DVD765, DVD766, DVD767, DVD771, DVD777, DVD779, DVD781, DVD783, DVD796, DVD803, DVD809, DVD811, DVD813, DVD825, DVD826, DVD831, DVD839, DVD841, and DVD843.

### Example 1.1.1.B

### Affinity Determination using BIACORE technology

[0385] The BIACORE assay (Biacore, Inc, Piscataway, N.J.) determines the affinity of antibodies or DVD-Ig with kinetic measurements of on-rate and off-rate constants. Binding of antibodies or DVD-Ig to a target antigen (for example, a purified recombinant target antigen) is determined by surface plasmon resonance-based measurements with a Biacore® 3000 instrument (Biacore® AB, Uppsala, Sweden) using running HBS-EP (10 mM HEPES [pH 7.4], 150 mM NaCl, 3 mM EDTA, and 0.005% surfactant P20) at 25° C. All chemicals are obtained from Biacore® AB (Uppsala, Sweden) or otherwise from a different source as described in the text. For example, approximately 5000 RU of goat anti-mouse IgG, (Fcγ), fragment specific polyclonal antibody (Pierce Biotechnology Inc, Rockford, Ill.) diluted in 10 mM sodium acetate (pH 4.5) is directly immobilized across a CM5 research grade biosensor chip using a standard amine coupling kit according to manufacturer's instructions and procedures at 25 μg/ml. Unreacted moieties on the biosensor surface are blocked with ethanolamine. Modified carboxymethyl dextran surface in flowcell 2 and 4 is used as a reaction surface. Unmodified carboxymethyl dextran without goat anti-mouse IgG in flow cell 1 and 3 is used as the reference surface. For kinetic analysis, rate equations derived from the 1:1 Langmuir binding model are fitted simultaneously to association and dissociation phases of all eight injections (using global fit analysis) with the use of Biaevaluation 4.0.1 software. Purified antibodies or DVD-Ig are diluted in HEPES-buffered saline for capture across goat anti-mouse IgG specific reaction surfaces. Antibodies to be captured as a ligand (25 μg/ml) are injected over reaction matrices at a flow rate of 5 μl/min. The association and dissociation rate constants, kₒₙ (M⁻¹ s⁻¹) and k_{off} (s⁻¹) are determined under a continuous flow rate of 25 μl/min. Rate constants are derived by making kinetic binding measurements at ten different antigen concentrations ranging from 10-200 nM. The equilibrium dissociation constant (M) of the reaction between antibodies or DVD-Igs and the target antigen is then calculated from the kinetic rate constants by the following formula: K_{D}=k_{off}/kₒₙ. Binding is recorded as a function of time and kinetic rate constants are calculated. In this assay, on-rates as fast as 10⁶ M⁻¹s⁻¹ and off-rates as slow as 10⁻⁶ s⁻¹ can be measured.

TABLE 4
BIACORE Analysis of Parental Antibodies and DVD Constructs

| Parent | | | | | | | | |
|---|---|---|---|---|---|---|---|---|
| Antibody | N-terminal | C-terminal | | | | | | |
| or DVD- | Variable | Variable | HC | LC | | Kₒₙ | k_{off} | k_{D} |
| Ig ID) | Domain (VD) | Domain (VD) | Linker | Linker | Antigen | (M-1s-1) | (s-1) | (M) |
| AB033 | EGFR (seq. 1) | | | | FL-hEGFR | 2.47E+05 | 1.13E−03 | 4.60E−09 |
| AB064 | EGFR (seq. 2) | | | | FL-hEGFR | ND | ND | ND |
| DVD321 | EGFR (seq. 2) | EGFR (seq. 1) | Short | Short | FL-hEGFR | 5.46E+04 | 7.39E−04 | 1.40E−08 |
| DVD322 | EGFR (seq. 1) | EGFR (seq. 2) | Short | Short | FL-hEGFR | 2.52E+05 | 1.04E−03 | 4.10E−09 |
| DVD795 | EGFR (seq. 2) | EGFR (seq. 1) | Long | Short | FL-hEGFR | 1.29E+04 | 2.59E−04 | 2.00E−08 |
| DVD796 | EGFR (seq. 1) | EGFR (seq. 2) | Long | Short | FL-hEGFR | 3.31E+05 | 1.21E−03 | 3.70E−09 |
| DVD765 | EGFR (seq. 2) | EGFR (seq. 1) | Long | Long | FL-hEGFR | 3.07E+04 | 2.61E−04 | 8.50E−09 |
| DVD766 | EGFR (seq. 1) | EGFR (seq. 2) | Long | Long | FL-hEGFR | 3.06E+05 | 1.21E−03 | 3.90E−09 |
| DVD825 | EGFR (seq. 2) | EGFR (seq. 1) | Short | Long | FL-hEGFR | 1.16E+04 | 2.95E−04 | 2.60E−08 |
| DVD826 | EGFR (seq. 1) | EGFR (seq. 2) | Short | Long | FL-hEGFR | 2.65E+05 | 1.10E−03 | 4.20E−09 |
| AB033 | EGFR (seq. 1) | | | | d2-7 trunc | 3.85E+05 | 1.06E−03 | 2.80E−09 |
| AB064 | EGFR (seq. 2) | | | | d2-7 trunc | 3.70E+04 | 6.82E−04 | 1.80E−08 |
| DVD321 | EGFR (seq. 2) | EGFR (seq. 1) | Short | Short | d2-7 trunc | 5.32E+04 | 4.55E−04 | 8.50E−09 |
| DVD322 | EGFR (seq. 1) | EGFR (seq. 2) | Short | Short | d2-7 trunc | 1.69E+05 | 5.70E−04 | 3.40E−09 |
| DVD795 | EGFR (seq. 2) | EGFR (seq. 1) | Long | Short | d2-7 trunc | 5.65E+04 | 2.53E−04 | 4.50E−09 |
| DVD796 | EGFR (seq. 1) | EGFR (seq. 2) | Long | Short | d2-7 trunc | 2.60E+05 | 5.02E−04 | 1.90E−09 |
| DVD765 | EGFR (seq. 2) | EGFR (seq. 1) | Long | Long | d2-7 trunc | 3.99E+04 | 2.16E−04 | 5.40E−09 |
| DVD766 | EGFR (seq. 1) | EGFR (seq. 2) | Long | Long | d2-7 trunc | 2.06E+05 | 4.56E−04 | 2.20E−09 |
| DVD825 | EGFR (seq. 2) | EGFR (seq. 1) | Short | Long | d2-7 trunc | 3.31E+04 | 2.40E−04 | 7.30E−09 |
| DVD826 | EGFR (seq. 1) | EGFR (seq. 2) | Short | Long | d2-7 trunc | 2.05E+05 | 4.84E−04 | 2.40E−09 |
| AB033 | EGFR (seq. 1) | | | | d-2-7 Cet | ND | ND | ND |
| AB064 | EGFR (seq. 2) | | | | d-2-7 Cet | 2.03E+04 | 6.60E−04 | 3.30E−08 |
| DVD321 | EGFR (seq. 2) | EGFR (seq. 1) | Short | Short | d-2-7 Cet | 2.49E+04 | 5.56E−04 | 2.20E−08 |
| DVD322 | EGFR (seq. 1) | EGFR (seq. 2) | Short | Short | d-2-7 Cet | 1.04E+04 | 4.34E−04 | 4.20E−08 |
| DVD795 | EGFR (seq. 2) | EGFR (seq. 1) | Long | Short | d-2-7 Cet | 2.42E+04 | 5.52E−04 | 2.30E−08 |
| DVD796 | EGFR (seq. 1) | EGFR (seq. 2) | Long | Short | d-2-7 Cet | 1.43E+04 | 4.48E−04 | 3.10E−08 |
| DVD765 | EGFR (seq. 2) | EGFR (seq. 1) | Long | Long | d-2-7 Cet | 2.65E+04 | 5.76E−04 | 2.20E−08 |
| DVD766 | EGFR (seq. 1) | EGFR (seq. 2) | Long | Long | d-2-7 Cet | 1.08E+04 | 4.45E−04 | 4.10E−08 |
| DVD825 | EGFR (seq. 2) | EGFR (seq. 1) | Short | Long | d-2-7 Cet | 2.56E+04 | 5.50E−04 | 2.20E−08 |
| DVD826 | EGFR (seq. 1) | EGFR (seq. 2) | Short | Long | d-2-7 Cet | 1.18E+04 | 4.45E−04 | 3.80E−08 |

[0386] Binding of all DVD-Ig constructs characterized by Biacore technology was maintained and comparable to that of parent antibodies. All N-terminal variable domains bound with a similar high affinity as the parent antibody.

### Example 1.1.2

### Assays Used To Determine the Functional Activity of Parent Antibodies and DVD-Ig

### Example 1.1.2.A

### A431 Cell Binding

[0387] Log phase A431 cells were harvested according to standard methods. Each sample containing 5×10⁴ cells (300 μL) was incubated with serial dilution of DVD-Igs in the cold room for 1 hour. Cells were then stained with PE-conjugated goat-anti-human antibody (Jackson ImmunoResearch Cat#109-115-098) (300 μL) and incubated in the cold room for 30 minutes. The stained cells were analyzed on FACSCalibur HTS (Becton Dickinson, San Jose). The data were analyzed with Prism (GraphPad Software, La Jolla) The data are shown in Table 5

### Example 1.1.2.B

### Cell Binding Competition Assay

[0388] 5 nM FITC-conjugated EGFR (seq. 2) were incubated with serial dilutions of DVD-Igs on ice for 15 minutes and then incubated with 5×10⁴ harvested log phase U87MG-de2-7 cells (300 μL) in the cold room for 1 hour. The stained cells were analyzed on FACSCalibur HTS (Becton Dickinson, San Jose). The data were analyzed with Prism (GraphPad Software, La Jolla). The data are shown in Table 5.

### Example 1.1.2.C

### Western Blot: Total EGFR (Receptor Down-Regulation) and pTyr

[0389] Log phase A431 or U87MG-de2-7 cells were plated into 6-well plates at 1×10⁶ cells per well (2 mL) Cells were serum starved the next day for 24 hours. Cells were then treated with 100 nM of various antibodies (30 μA) for 1 hour and then stimulated with 15 nM EGF (0.5 μL) for 10 minutes. Cells were then harvested and lyzed on ice with RIPA buffer (150 μL per well) (Sigma). Cell lysates were separated on a SDS-PAGE gel according to standard methods and then transferred to PVDF membrane (Invitrogen). The proteins were detected by Western blotting using various antibody probes. The data are shown in Table 5.

### Example 1.1.2.D

### Cell Proliferation (Clonogenic) Assay

[0390] Log phase A431 cells were plated into 96-well plates at 300 cells per well in 100 Cells were treated with serial dilution of antibodies the next day and incubated for 7-10 days. Cells were fixed with 3.7% paraformaldehyde for 20 minutes and then stained with 0.1% crystal violet for 1 hour. The stained crystal violet was extracted by 10% acetic acid for 1 hour and then quantitated at OD590. The data are shown in Table 5.

TABLE 5
Screening of EGFR DVD-Igs

| | | | | | | | | | EGFR | |
|---|---|---|---|---|---|---|---|---|---|---|
| | | | | | Other | | | Ptyr | Rec. | Cell |
| | Sequence | | HC | LC | DVD | A431 | EGFR | Sign. | Down | Prolif. |
| DVD ID | ID | Pos. | Linker | Linker | Domain | Bind. | Comp. | Inhib. | Reg. | Inhib. |
| DVD322 | EGFR (seq. | C- | Short | Short | EGFR | + | − | + | − | ND |
| | 2) | term | | | (seq. 1) | | | | | |
| DVD321 | EGFR (seq. | N- | Short | Short | EGFR | − | + | − | + | ND |
| | 2) | term | | | (seq. 1) | | | | | |
| DVD766 | EGFR (seq. | C- | Long | Long | EGFR | + | + | + | − | ND |
| | 2) | term | | | (seq. 1) | | | | | |
| DVD765 | EGFR (seq. | N- | Long | Long | EGFR | + | + | + | + | + |
| | 2) | term | | | (seq. 1) | | | | | |
| DVD796 | EGFR (seq. | C- | Long | Short | EGFR | + | + | − | − | ND |
| | 2) | term | | | (seq. 1) | | | | | |
| DVD795 | EGFR (seq. | N- | Long | Short | EGFR | + | + | + | + | + |
| | 2) | term | | | (seq. 1) | | | | | |
| DVD826 | EGFR (seq. | C- | Short | Long | EGFR | + | + | − | − | ND |
| | 2) | term | | | (seq. 1) | | | | | |
| DVD825 | EGFR (seq. | N- | Short | Long | EGFR | + | + | − | − | ND |
| | 2) | term | | | (seq. 1) | | | | | |

### Example 1.1.2.E

### Down Regulation of Total EGFR in Multiple Human Cancer Cell Lines by MSD Assay

[0391] Log phase cells (A431, A431NS, A549 or HN5) were plated into 96-well plate at 1×10⁴ cells/well (100 μL) The next day, the cells were treated with different antibodies (30 μL) at 100 nM for 2 hours at 37° C. The cells were then harvested and total EGFR levels were quantitated with Whole Cell Lysate Kit-Total EGFR Assay (Meso Scale Discovery Cat#K151CKD-2) according to the manufacturer's protocol. The data are shown in Table 6.

TABLE 6
Down regulation of total EGFR in multiple human cancer
cell lines by MSD Assay
Percentage of Control (100 nM)

| | | | | EGFR |
|---|---|---|---|---|
| | | | | (seq. 2) + |
| | EGFR | EGFR | | EGFR |
| Cell Lines | (seq. 2) | (seq. 1) | DVD795 | (seq. 1) |
| A431 | 97 | 30 | 14 | 32 |
| A431NS | 98 | 44 | 24 | 43 |
| A549 | 91 | 29 | 7 | 29 |
| HN5 | 102 | 53 | 11 | 36 |
| NCI-H1975 | 94 | 35 | 15 | 25 |
| OVCAR5 | 94 | 34 | 12 | 36 |
| PC3 | 108 | 57 | 20 | 72 |
| U87MG | 96 | 58 | 18 | 59 |
| U87MG-EGFRwt | 86 | 57 | 13 | 39 |
| U87MG-de2-7 | 90 | 49 | 21 | 52 |

[0392] DVD795 showed down regulation of total EGFR in all human cancer cell lines tested.

### Example 1.1.2.G

### Cytokine Bioassay

[0393] The ability of an anti-cytokine parent antibody or DVD-Ig containing anti-cytokine sequences to inhibit or neutralize a target cytokine bioactivity is analyzed by determinating inhibitory potential of the antibody or DVD-Ig. For example, the ability of an anti-IL-4 antibody to inhibit IL-4 mediated IgE production may be used. For example, human naive B cells are isolated from peripheral blood, respectively, buffy coats by Ficoll-paque density centrifugation, followed by magnetic separation with MACS beads (Miltenyi Biotech) specific for human sIgD FITC labeled goat F(ab)2 antibodies followed by anti-FITC MACS beads. Magnetically sorted naive B cells are adjusted to 3×10⁵ cells per ml in XV15 and plated out in 100 μA per well of 96-well plates in a 6×6 array in the center of the plate, surrounded by PBS filled wells during the 10 days of culture at 37° C. in the presence of 5% CO₂. One plate each is prepared per antibody to be tested, consisting of 3 wells each of un-induced and induced controls and quintuplicate repeats of antibody titrations starting at 7 μg/ml and running in 3-fold dilution down to 29 ng/ml final concentrations added in 50 μl four times concentrated pre-dilution. To induce IgE production, rhIL-4 at 20 ng/ml plus anti-CD40 monoclonal antibody (Novartis) at 0.5 μg/ml final concentrations in 50 μl each are added to each well, and IgE concentrations are determined at the end of the culture period by a standard sandwich ELISA method.

### Example 1.1.2.H

### Cytokine Release Assay

[0394] The ability of a parent antibody or DVD-Ig to cause cytokine release is analyzed. Peripheral blood is withdrawn from three healthy donors by venipuncture into heparized vacutainer tubes. Whole blood is diluted 1:5 with RPMI-1640 medium and placed in 24-well tissue culture plates at 0.5 mL per well. The anti-cytokine antibodies (e.g., anti-IL-4) are diluted into RPMI-1640 and placed in the plates at 0.5 mL/well to give final concentrations of 200, 100, 50, 10, and 1 μg/mL. The final dilution of whole blood in the culture plates is 1:10. LPS and PHA are added to separate wells at 2 μg/mL and 5 μg/mL final concentration as a positive control for cytokine release. Polyclonal human IgG is used as negative control antibody. The experiment is performed in duplicate. Plates are incubated at 37° C. at 5% CO₂. Twenty-four hours later the contents of the wells are transferred into test tubes and spun for 5 minutes at 1200 rpm. Cell-free supernatants are collected and frozen for cytokine assays. Cells left over on the plates and in the tubes are lysed with 0.5 mL of lysis solution, and placed at −20° C. and thawed. 0.5 mL of medium is added (to bring the volume to the same level as the cell-free supernatant samples) and the cell preparations are collected and frozen for cytokine assays. Cell-free supernatants and cell lysates are assayed for cytokine levels by ELISA, for example, for levels of IL-8, IL-6, IL-1β, IL-IRA, TNF-α.

### Example 1.1.2.I

### Redirected Cytotoxicity (rCTL) Assay: FACS Based

[0395] Human CD3+ T cells were isolated from previously frozen isolated PBMC by a negative selection enrichment column (R&D Cat.#HTCC-525). T cells were stimulated for 4 days in flasks coated with 10 μg/mL anti-CD3 (OKT-3, BD) and 2 μg/mL anti-CD28 (CD28.2, Abcam) in complete RPMI media (L-glutamine, 55 mM β-ME, Pen/Strep, 10% FCS). T cells were rested overnight in 30 U/mL IL-2 (Peprotech) before using in assay. DoHH2 or Raji target cells were labeled with PKH26 (Sigma) according to manufacturer's instructions. RPMI 1640 media (no phenol, Invitrogen) containing L-glutamine and 10% FBS (Hyclone) was used throughout the rCTL assay.

[0396] Effector T cells (E) and targets (T) were plated at 10⁵ and 10⁴ cells/well in 96-well plates (Costar #3799), respectively to give an E:T ratio of 10:1. DVD-Ig molecules were appropriately diluted to obtain concentration-dependent titration curves. After an overnight incubation cells were pelleted and washed with PBS once before resuspending in 100 μL PBS containing 0.1% BSA (Invitrogen) and 0.5 μg/mL propidium iodide (BD). FACS data was collected on a FACSCanto machine (Becton Dickinson, San Jose) and analyzed in Flowjo (Treestar). The percent live targets in the DVD-Ig treated samples divided by the percent total targets (control, no treatment) was calculated to determine percent specific lysis. The data is graphed and IC50s are calculated in Prism (Graphpad Software, La Jolla).

### Example 1.1

### Redirected Cytotoxicity (rCTL) Assay: Impedence Based

[0397] T cells were prepared as above. EGFR-expressing target cells were allowed to adhere to ACEA RT-CES 96-well plates (ACEA Bio, San Diego) overnight. Effector T cells (E) and targets (T) were then plated at 2×10⁵ and 2×10⁴ cells/well to give an E:T ratio of 10:1. DVD-Ig molecules were appropriately diluted to obtain concentration-dependent titration curves. The cell indexes of targets in the DVD-Ig treated samples were divided by the cell indexes of control targets (no treatment) to calculate percent specific lysis. The data was graphed and IC50s were calculated in Prism (Graphpad Software, La Jolla). The data is shown in Table 7

TABLE 7
rCTL Activity of EGFR (seq. 2) Containing DVD-Igs

| | | | | | Other | rCTL |
|---|---|---|---|---|---|---|
| | Sequence | | HC | LC | DVD | activity |
| DVD ID | ID | Position | Linker | Linker | Domain | IC50 (pM) |
| DVD774 | EGFR | C-term | Long | Long | CD3 | 0.2 |
| | (seq. 2) | | | | | |
| DVD773 | EGFR | N-term | Long | Long | CD3 | 16 |
| | (seq. 2) | | | | | |
| DVD804 | EGFR | C-term | Long | Short | CD3 | 0.09 |
| | (seq. 2) | | | | | |
| DVD803 | EGFR | N-term | Long | Short | CD3 | 42 |
| | (seq. 2) | | | | | |
| DVD332 | EGFR | C-term | Short | Short | CD3 | 0.03 |
| | (seq. 2) | | | | | |
| DVD331 | EGFR | N-term | Short | Short | CD3 | >200 nM |
| | (seq. 2) | | | | | |
| DVD834 | EGFR | C-term | Short | Long | CD3 | 0.08 |
| | (seq. 2) | | | | | |
| DVD833 | EGFR | N-term | Short | Long | CD3 | 12 |
| | (seq. 2) | | | | | |

[0398] All DVD-Igs containing VDs from AB002 in either the N-terminal or C-terminal position showed killing in the rCTL assay.

### Example 1.1.2.C

### Cytokine Cross-Reactivity Study

[0399] The ability of an anti-cytokine parent antibody or DVD-Ig directed to a cytokine(s) of interest to cross react with other cytokines is analyzed. Parent antibodies or DVD-Ig are immobilized on a BIAcore biosensor matrix. An anti-human Fc mAb is covalently linked via free amine groups to the dextran matrix by first activating carboxyl groups on the matrix with 100 mM N-hydroxysuccinimide (NHS) and 400 mM N-Ethyl-N′-(3-dimethylaminopropyl)-carbodiimide hydrochloride (EDC). Approximately 50 μL of each antibody or DVD-Ig preparation at a concentration of 25 μg/mL, diluted in sodium acetate, pH4.5, is injected across the activated biosensor and free amines on the protein are bound directly to the activated carboxyl groups. Typically, 5000 Resonance Units (RU's) are immobilized. Unreacted matrix EDC-esters are deactivated by an injection of 1 M ethanolamine. A second flow cell is prepared as a reference standard by immobilizing human IgG1/K using the standard amine coupling kit. SPR measurements are performed using the CM biosensor chip. All antigens to be analyzed on the biosensor surface are diluted in HBS-EP running buffer containing 0.01% P20.

[0400] To examine the cytokine binding specificity, excess cytokine of interest (100 nM, e.g., soluble recombinant human) is injected across the anti-cytokine parent antibody or DVD-Ig immobilized biosensor surface (5 minute contact time). Before injection of the cytokine of interest and immediately afterward, HBS-EP buffer alone flows through each flow cell. The net difference in the signals between the baseline and the point corresponding to approximately 30 seconds after completion of cytokine injection are taken to represent the final binding value. Again, the response is measured in Resonance Units. Biosensor matrices are regenerated using 10 mM HCl before injection of the next sample where a binding event is observed, otherwise running buffer was injected over the matrices. Human cytokines (e.g., IL-1α, IL-1β, IL-2, IL-3, IL-4, IL-5, IL-6, IL-7, IL-8, IL-9, IL-10, IL-11, IL-12, IL-13, IL-15, IL-16, IL-17, IL-18, IL-19, IL-20, IL-22, IL-23, IL-27, TNF-α, TNF-β, and IFN-γ, for example) are also simultaneously injected over the immobilized mouse IgG1/K reference surface to record any nonspecific binding background. By preparing a reference and reaction surface, Biacore can automatically subtract the reference surface data from the reaction surface data in order to eliminate the majority of the refractive index change and injection noise. Thus, it is possible to ascertain the true binding response attributed to an anti-cytokine antibody or DVD-Ig binding reaction.

[0401] When a cytokine of interest is injected across immobilized anti-cytokine antibody, significant binding is observed. 10 mM HCl regeneration completely removes all non-covalently associated proteins. Examination of the sensorgram shows that immobilized anti-cytokine antibody or DVD-Ig binding to soluble cytokine is strong and robust. After confirming the expected result with the cytokine of interest, the panel of remaining recombinant human cytokines is tested, for each antibody or DVD-Ig separately. The amount of anti-cytokine antibody or DVD-Ig bound or unbound cytokine for each injection cycle is recorded. The results from three independent experiments are used to determine the specificity profile of each antibody or DVD-Ig. Antibodies or DVD-Ig with the expected binding to the cytokine of interest and no binding to any other cytokine are selected.

### Example 1.1.2.D

### Tissue Cross Reactivity

[0402] Tissue cross reactivity studies are done in three stages, with the first stage including cryosections of 32 tissues, second stage including up to 38 tissues, and the 3^{rd} stage including additional tissues from 3 unrelated adults as described below. Studies are done typically at two dose levels.

[0403] Stage 1:

[0404] Cryosections (about 5 μm) of human tissues (32 tissues (typically: Adrenal Gland, Gastrointestinal Tract, Prostate, Bladder, Heart, Skeletal Muscle, Blood Cells, Kidney, Skin, Bone Marrow, Liver, Spinal Cord, Breast, Lung, Spleen, Cerebellum, Lymph Node, Testes, Cerebral Cortex, Ovary, Thymus, Colon, Pancreas, Thyroid, Endothelium, Parathyroid, Ureter, Eye, Pituitary, Uterus, Fallopian Tube and Placenta) from one human donor obtained at autopsy or biopsy) are fixed and dried on object glass. The peroxidase staining of tissue sections is performed, using the avidin-biotin system.

[0405] Stage 2:

[0406] Cryosections (about 5 μm) of human tissues 38 tissues (including adrenal, blood, blood vessel, bone marrow, cerebellum, cerebrum, cervix, esophagus, eye, heart, kidney, large intestine, liver, lung, lymph node, breast mammary gland, ovary, oviduct, pancreas, parathyroid, peripheral nerve, pituitary, placenta, prostate, salivary gland, skin, small intestine, spinal cord, spleen, stomach, striated muscle, testis, thymus, thyroid, tonsil, ureter, urinary bladder, and uterus) from 3 unrelated adults obtained at autopsy or biopsy) are fixed and dried on object glass. The peroxidase staining of tissue sections is performed, using the avidin-biotin system.

[0407] Stage 3:

[0408] Cryosections (about 5 μm) of cynomolgus monkey tissues (38 tissues (including adrenal, blood, blood vessel, bone marrow, cerebellum, cerebrum, cervix, esophagus, eye, heart, kidney, large intestine, liver, lung, lymph node, breast mammary gland, ovary, oviduct, pancreas, parathyroid, peripheral nerve, pituitary, placenta, prostate, salivary gland, skin, small intestine, spinal cord, spleen, stomach, striated muscle, testis, thymus, thyroid, tonsil, ureter, urinary bladder, and uterus) from 3 unrelated adult monkeys obtained at autopsy or biopsy) are fixed and dried on object glass. The peroxidase staining of tissue sections is performed, using the avidin-biotin system.

[0409] The antibody or DVD-Ig is incubated with the secondary biotinylated anti-human IgG and developed into immune complex. The immune complex at the final concentrations of 2 and 10 μg/mL of antibody or DVD-Ig is added onto tissue sections on object glass and then the tissue sections are reacted for 30 minutes with a avidin-biotin-peroxidase kit. Subsequently, DAB (3,3′-diaminobenzidine), a substrate for the peroxidase reaction, is applied for 4 minutes for tissue staining. Antigen-Sepharose beads are used as positive control tissue sections. Target antigen and human serum blocking studies serve as additional controls. The immune complex at the final concentrations of 2 and 10 μg/mL of antibody or DVD-Ig is pre-incubated with target antigen (final concentration of 100 μg/ml) or human serum (final concentration 10%) for 30 minutes, and then added onto the tissue sections on object glass and then the tissue sections are reacted for 30 minutes with a avidin-biotin-peroxidase kit. Subsequently, DAB (3,3′-diaminobenzidine), a substrate for the peroxidase reaction, is applied for 4 minutes for tissue staining.

[0410] Any specific staining is judged to be either an expected (e.g., consistent with antigen expression) or unexpected reactivity based upon known expression of the target antigen in question. Any staining judged specific is scored for intensity and frequency. The tissue staining between stage 2 (human tissue) and stage 3 (cynomolgus monkey tissue) is either judged to be similar or different.

### Example 1.1.2.E

### Tumoricidal Effect of a Parent or DVD-Ig Antibody In Vitro

[0411] Parent antibodies or DVD-Ig that bind to target antigens on tumor cells may be analyzed for tumoricidal activity. Briefly, parent antibodies or DVD-Ig are diluted in D-PBS-BSA (Dulbecco's phosphate buffered saline with 0.1% BSA) and added to human tumor cells at final concentrations of 0.01 μg/mL to 100 μg/mL. The plates are incubated at 37° C. in a humidified, 5% CO₂ atmosphere for 3 days. The number of live cells in each well is quantified using MTS reagents according to the manufacturer's instructions (Promega, Madison, Wis.) to determine the percent of tumor growth inhibition. Wells without antibody treatment are used as controls of 0% inhibition whereas wells without cells are considered to show 100% inhibition.

[0412] For assessment of apoptosis, caspase-3 activation is determined by the following protocol: antibody-treated cells in 96 well plates are lysed in 120 μl of 1× lysis buffer (1.67 mM Hepes, pH 7.4, 7 mM KCl, 0.83 mM MgCl₂, 0.11 mM EDTA, 0.11 mM EGTA, 0.57% CHAPS, 1 mM DTT, 1× protease inhibitor cocktail tablet; EDTA-free; Roche Pharmaceuticals, Nutley, N.J.) at room temperature with shaking for 20 minutes. After cell lysis, 80 μl of a caspase-3 reaction buffer (48 mM Hepes, pH 7.5, 252 mM sucrose, 0.1% CHAPS, 4 mM DTT, and 20 μM Ac-DEVD-AMC substrate; Biomol Research Labs, Inc., Plymouth Meeting, Pa.) is added and the plates are incubated for 2 hours at 37° C. The plates are read on a 1420 VICTOR Multilabel Counter (Perkin Elmer Life Sciences, Downers Grove, Ill.) using the following settings: excitation=360/40, emission=460/40. An increase of fluorescence units from antibody-treated cells relative to the isotype antibody control-treated cells is seen, which is indicative of apoptosis.

### Example 1.1.2.F

### Inhibition of Receptor Activation by Antibodies or DVD-Ig In Vitro

[0413] Parent antibodies or DVD-Ig that bind to cell receptors or their ligands may be tested for inhibition of receptor activation. Parent antibodies or DVD-Ig diluted in D-PBS-BSA (Dulbecco's phosphate buffered saline with 0.1% BSA) are added to human carcinoma cells at final concentrations of 0.01 μg/mL to 100 μg/mL. The plates are incubated at 37° C. in a humidified, 5% CO₂ atmosphere for 1 h. Growth factors (e.g., IGF1 or IGF2) at concentration of 1-100 ng/mL are added to the cells for 5-15 minutes to stimulate receptor (e.g., IGF1R) autophosphorylation. Wells without antibody treatment are used as controls of 0% inhibition whereas wells without growth factor stimulation are considered to show 100% inhibition. Cell lysates are made by incubation with cell extraction buffer (10 mM Tris, pH 7.4, 100 mM NaCl, 1 mM EDTA, 1 mM EGTA, 1 mM NaF, 1 mM sodium orthovanadate, 1% Triton X-100, 10% Glycerol, 0.1% SDS, and protease inhibitor cocktail). Phospho-IGF1R in these cell lysates is determined using specific ELISA kits purchased from R&D System (Minneapolis, Minn.).

### Example 1.1.2.G

### Efficacy of an Anti-Tumor Cell Antigen Antibody or DVD-12 by Itself or in Combination with Chemotherapy on the Growth of Human Carcinoma Xenografts (Subcutaneous Flank, Orthotopic, or Spontaneous Metastases)

[0414] Human cancer cells are grown in vitro to 99% viability, 85% confluence in tissue culture flasks. SCID female or male mice (Charles Rivers Labs) at 19-25 grams are ear tagged and shaved. Mice are then inoculated subcutaneously into the right flank with 0.2 ml of 2×10⁶ human tumor cells (1:1 matrigel) on study day 0. Administration (IP, Q3D/week) of vehicle (PBS), antibody or DVD-Ig, and/or chemotherapy is initiated after mice are size matched into separate cages of mice with mean tumor volumes of approximately 150 to 200 mm³ The tumors are measured by a pair of calipers twice a week starting on approximately day 10 post inoculation and the tumor volumes calculated according to the formula V=L×W²/2 (V: volume, mm³; L: length, mm. W: width, m) Reduction in tumor volume is seen in animals treated with antibody or DVD-Ig alone or in combination with chemotherapy relative to tumors in animals that received only vehicle or an isotype control mAb.

### Example 1.1.2.H

### Binding of Monoclonal Antibodies to the Surface of Human Tumor Cell Lines as Assessed by Flow Cytometry

[0415] Stable cell lines overexpressing cell-surface antigen of interest or human tumor cell lines were harvested from tissue culture flasks and resuspended in phosphate buffered saline (PBS) containing 5% fetal calf serum (PBS/FCS). Prior to staining, human tumor cells were incubated on ice with human IgG at 200 μg/ml in PBS/FCS. 1-5×10⁵ cells were incubated with antibody or DVD-Ig (1-2 μg/mL) in PBS/FCS for 30-60 minutes on ice. Cells were washed twice and 100 μl of goat anti mouse IgG-phycoerythrin (1:300 dilution in PBS/BSA) (Jackson ImmunoResearch, West Grove, Pa., Cat.#115-115-164) was added. After 30 minutes incubation on ice, cells were washed twice and resuspended in PBS/FCS. Fluorescence was measured using a Becton Dickinson FACSCalibur (Becton Dickinson, San Jose, Calif.). That data are shown in Table 8.

TABLE 8
FACS binding for EGFR (seq. 2) Containing DVD-Igs

| | | | | | Other | Jurkat | U287IΔ2-7 |
|---|---|---|---|---|---|---|---|
| | | | HC | LC | DVD | FACS | FACS % of |
| DVD ID | Sequence ID | Position | Linker | Linker | Domain | EC50 (pM) | parent |
| DVD774 | EGFR (seq. 2) | C-term | Long | Long | CD3 | 890 | 70 |
| DVD773 | EGFR (seq. 2) | N-term | Long | Long | CD3 | >10 nM | 105 |
| DVD804 | EGFR (seq. 2) | C-term | Long | Short | CD3 | 650 | 70 |
| DVD803 | EGFR (seq. 2) | N-term | Long | Short | CD3 | >10 nM | 110 |
| DVD332 | EGFR (seq. 2) | C-term | Short | Short | CD3 | 775 | 40 |
| DVD331 | EGFR (seq. 2) | N-term | Short | Short | CD3 | >10 nM | 115 |
| DVD834 | EGFR (seq. 2) | C-term | Short | Long | CD3 | 700 | 65 |
| DVD833 | EGFR (seq. 2) | N-term | Short | Long | CD3 | >10 nM | 110 |

[0416] All DVD-Igs showed binding to their cell surface targets. The N-terminal domains of DVD-Igs bound their targets on the cell surface as well as or better than the parent antibody. Binding can be restored or improved by adjusting linker length

### Example 1.2

### Generation of Parent Monoclonal Antibodies to a Human Antigen of Interest

[0417] Parent mouse mAbs able to bind to and neutralize a human antigen of interest and a variant thereof are obtained as follows:

### Example 1.2.A

### Immunization of Mice with a Human Antigen of Interest

[0418] Twenty micrograms of recombinant purified human antigen (e.g., IGF 1,2) mixed with complete Freund's adjuvant or Immunoeasy adjuvant (Qiagen, Valencia, Calif.) is injected subcutaneously into five 6-8 week-old Balb/C, five C57B/6 mice, and five AJ mice on Day 1. On days 24, 38, and 49, twenty micrograms of recombinant purified human antigen variant mixed with incomplete Freund's adjuvant or Immunoeasy adjuvant is injected subcutaneously into the same mice. On day 84 or day 112 or day 144, mice are injected intravenously with 1 μg recombinant purified human antigen of interest.

### Example 1.2.B

### Generation of Hybridoma

[0419] Splenocytes obtained from the immunized mice described in Example 1.2.A are fused with SP2/O—Ag-14 cells at a ratio of 5:1 according to the established method described in Kohler, G. and Milstein, C. (1975) Nature 256: 495 to generate hybridomas. Fusion products are plated in selection media containing azaserine and hypoxanthine in 96-well plates at a density of 2.5×10⁶ spleen cells per well. Seven to ten days post fusion, macroscopic hybridoma colonies are observed. Supernatant from each well containing hybridoma colonies is tested by ELISA for the presence of antibody to the antigen of interest (as described in Example 1.2.A). Supernatants displaying antigen-specific activity are then tested for activity (as described in the assays of Example 1.1.2), for example, the ability to neutralize the antigen of interest in a bioassay such as that described in Example 1.1.2.A).

### Example 1.2.C

### Identification and Characterization of Parent Monoclonal Antibodies to a Human Target Antigen of Interest

### Example 1.2.C.1

### Analyzing Parent Monoclonal Antibody Neutralizing Activity

[0420] Hybridoma supernatants are assayed for the presence of parent antibodies that bind an antigen of interest, generated according to Examples 1.2.A and 1.2.B, and are also capable of binding a variant of the antigen of interest (“antigen variant”). Supernatants with antibodies positive in both assays are then tested for their antigen neutralization potency, for example, in the cytokine bioassay of Example 1.1.2.A. The hybridomas producing antibodies with IC₅₀ values in the bioassay less than 1000 μM, in an embodiment, less than 100 μM are scaled up and cloned by limiting dilution. Hybridoma cells are expanded into media containing 10% low IgG fetal bovine serum (Hyclone #SH30151, Logan, Utah.). On average, 250 mL of each hybridoma supernatant (derived from a clonal population) is harvested, concentrated and purified by protein A affinity chromatography, as described in Harlow, E. and Lane, D. 1988 “Antibodies: A Laboratory Manual”. The ability of purified mAbs to inhibit the activity of its target antigen is determined, for example, using the cytokine bioassay as described in Example 1.1.2.A.

### Example 1.2.C.2

### Analyzing Parent Monoclonal Antibody Cross-Reactivity to Cynomolgus Target Antigen of Interest

[0421] To determine whether the selected mAbs described herein recognize cynomolgus antigen of interest, BIACORE analysis is conducted as described herein (Example 1.1.1.B) using recombinant cynomolgus target antigen. In addition, neutralization potencies of mAbs against recombinant cynomolgus antigen of interest may also be measured in the cytokine bioassay (Example 1.1.2.A). MAbs with good cyno cross-reactivity (in an embodiment, within 5-fold of reactivity for human antigen) are selected for future characterization.

### Example 1.2.D

### Determination of the Amino Acid Sequence of the Variable Region for Each Murine Anti-Human Monoclonal Antibody

[0422] Isolation of the cDNAs, expression and characterization of the recombinant anti-human mouse mAbs is conducted as follows. For each amino acid sequence determination, approximately 1×10⁶ hybridoma cells are isolated by centrifugation and processed to isolate total RNA with Trizol (Gibco BRL/Invitrogen, Carlsbad, Calif.) following manufacturer's instructions. Total RNA is subjected to first strand DNA synthesis using the SuperScript First-Strand Synthesis System (Invitrogen, Carlsbad, Calif.) per the manufacturers instructions. Oligo(dT) is used to prime first-strand synthesis to select for poly(A)+ RNA. The first-strand cDNA product is then amplified by PCR with primers designed for amplification of murine immunoglobulin variable regions (Ig-Primer Sets, Novagen, Madison, Wis.). PCR products are resolved on an agarose gel, excised, purified, and then subcloned with the TOPO Cloning kit into pCR2.1-TOPO vector (Invitrogen, Carlsbad, Calif.) and transformed into TOP10 chemically competent E. coli (Invitrogen, Carlsbad, Calif.). Colony PCR is performed on the transformants to identify clones containing insert. Plasmid DNA is isolated from clones containing insert using a QIAprep Miniprep kit (Qiagen, Valencia, Calif.). Inserts in the plasmids are sequenced on both strands to determine the variable heavy or variable light chain DNA sequences using M13 forward and M13 reverse primers (Fermentas Life Sciences, Hanover Md.). Variable heavy and variable light chain sequences of the mAbs are identified. In an embodiment, the selection criteria for a panel of lead mAbs for next step development (humanization) includes the following:
[0423] The antibody does not contain any N-linked glycosylation sites (NXS), except from the standard one in CH2
[0424] The antibody does not contain any extra cysteines in addition to the normal cysteines in every antibody
[0425] The antibody sequence is aligned with the closest human germline sequences for VH and VL and any unusual amino acids should be checked for occurrence in other natural human antibodies
[0426] N-terminal Glutamine (Q) is changed to Glutamic acid (E) if it does not affect the activity of the antibody. This will reduce heterogeneity due to cyclization of Q
[0427] Efficient signal sequence cleavage is confirmed by Mass Spectrophotometry. This can be done with COS cell or 293 cell material
[0428] The protein sequence is checked for the risk of deamidation of Asn that could result in loss of activity
[0429] The antibody has a low level of aggregation
[0430] The antibody has solubility>5-10 mg/ml (in research phase); >25 mg/ml
[0431] The antibody has a normal size (5-6 nm) by Dynamic Light Scattering (DLS)
[0432] The antibody has a low charge heterogeneity
[0433] The antibody lacks cytokine release (see Example 1.1.2.B)
[0434] The antibody has specificity for the intended cytokine (see Example 1.1.2.C)
[0435] The antibody lacks unexpected tissue cross reactivity (see Example 1.1.2.D)
[0436] The antibody has similarity between human and cynomolgus tissue cross reactivity (see Example 1.1.2.D)

### Example 1.2.2

### Recombinant Humanized Parent Antibodies

### Example 1.2.2.1

### Construction and Expression of Recombinant Chimeric Anti Human Parent Antibodies

[0437] The DNA encoding the heavy chain constant region of murine anti-human parent mAbs is replaced by a cDNA fragment encoding the human IgG1 constant region containing 2 hinge-region amino acid mutations by homologous recombination in bacteria. These mutations are a leucine to alanine change at position 234 (EU numbering) and a leucine to alanine change at position 235 (Lund et al. (1991) J. Immunol. 147: 2657). The light chain constant region of each of these antibodies is replaced by a human kappa constant region. Full-length chimeric antibodies are transiently expressed in COS cells by co-transfection of chimeric heavy and light chain cDNAs ligated into the pBOS expression plasmid (Mizushima and Nagata (1990) Nucl. Acids Res. 18: 5322). Cell supernatants containing recombinant chimeric antibody are purified by Protein A Sepharose chromatography and bound antibody is eluted by addition of acid buffer. Antibodies are neutralized and dialyzed into PBS.

[0438] The heavy chain cDNA encoding a chimeric mAb is co-transfected with its chimeric light chain cDNA (both ligated in the pBOS vector) into COS cells. Cell supernatant containing recombinant chimeric antibody is purified by Protein A Sepharose chromatography and bound antibody is eluted by addition of acid buffer. Antibodies are neutralized and dialyzed into PBS.

[0439] The purified chimeric anti-human parent mAbs are then tested for their ability to bind (by Biacore) and for functional activity, e.g., to inhibit the cytokine induced production of IgE as described in Examples 1.1.1.B and 1.1.2.B. Chimeric mAbs that maintain the activity of the parental hybridoma mAbs are selected for future development.

### Example 1.2.2.2

### Construction and Expression of Humanized Anti Human ParentAntibodies

### Example 1.2.2.2.A

### Selection of Human Antibody Frameworks

[0440] Each murine variable heavy and variable light chain gene sequence is separately aligned against 44 human immunoglobulin germline variable heavy chain or 46 germline variable light chain sequences (derived from NCBI Ig Blast website at http://www.ncbi.nlm.nih.gov/igblast/retrieveig.html.) using Vector NTI software.

[0441] Humanization is based on amino acid sequence homology, CDR cluster analysis, frequency of use among expressed human antibodies, and available information on the crystal structures of human antibodies. Taking into account possible effects on antibody binding, VH-VL pairing, and other factors, murine residues are mutated to human residues where murine and human framework residues are different, with a few exceptions. Additional humanization strategies are designed based on an analysis of human germline antibody sequences, or a subgroup thereof, that possessed a high degree of homology, i.e., sequence similarity, to the actual amino acid sequence of the murine antibody variable regions.

[0442] Homology modeling is used to identify residues unique to the murine antibody sequences that are predicted to be critical to the structure of the antibody combining site, the CDRs. Homology modeling is a computational method whereby approximate three dimensional coordinates are generated for a protein. The source of initial coordinates and guidance for their further refinement is a second protein, the reference protein, for which the three dimensional coordinates are known and the sequence of which is related to the sequence of the first protein. The relationship among the sequences of the two proteins is used to generate a correspondence between the reference protein and the protein for which coordinates are desired, the target protein. The primary sequences of the reference and target proteins are aligned with coordinates of identical portions of the two proteins transferred directly from the reference protein to the target protein. Coordinates for mismatched portions of the two proteins, e.g., from residue mutations, insertions, or deletions, are constructed from generic structural templates and energy refined to insure consistency with the already transferred model coordinates. This computational protein structure may be further refined or employed directly in modeling studies. The quality of the model structure is determined by the accuracy of the contention that the reference and target proteins are related and the precision with which the sequence alignment is constructed.

[0443] For the murine mAbs, a combination of BLAST searching and visual inspection is used to identify suitable reference structures. Sequence identity of 25% between the reference and target amino acid sequences is considered the minimum necessary to attempt a homology modeling exercise. Sequence alignments are constructed manually and model coordinates are generated with the program Jackal (see Petrey, D. et al. (2003) Proteins 53 (Suppl. 6): 430-435).

[0444] The primary sequences of the murine and human framework regions of the selected antibodies share significant identity. Residue positions that differ are candidates for inclusion of the murine residue in the humanized sequence in order to retain the observed binding potency of the murine antibody. A list of framework residues that differ between the human and murine sequences is constructed manually.

[0445] The likelihood that a given framework residue would impact the binding properties of the antibody depends on its proximity to the CDR residues. Therefore, using the model structures, the residues that differ between the murine and human sequences are ranked according to their distance from any atom in the CDRs. Those residues that fell within 4.5 Å of any CDR atom are identified as most important and are recommended to be candidates for retention of the murine residue in the humanized antibody (i.e., back mutation).

[0446] In silico constructed humanized antibodies are constructed using oligonucleotides. For each variable region cDNA, 6 oligonucleotides of 60-80 nucleotides each are designed to overlap each other by 20 nucleotides at the 5′ and/or 3′ end of each oligonucleotide. In an annealing reaction, all 6 oligonucleotides are combined, boiled, and annealed in the presence of dNTPs. DNA polymerase I, Large (Klenow) fragment (New England Biolabs #M0210, Beverley, Mass.) is added to fill-in the approximately 40 bp gaps between the overlapping oligonucleotides. PCR is performed to amplify the entire variable region gene using two outermost primers containing overhanging sequences complementary to the multiple cloning site in a modified pBOS vector (Mizushima, S, and Nagata, S. (1990) Nucleic Acids Res. 18: 17). The PCR products derived from each cDNA assembly are separated on an agarose gel and the band corresponding to the predicted variable region cDNA size is excised and purified. The variable heavy region is inserted in-frame onto a cDNA fragment encoding the human IgG1 constant region containing 2 hinge-region amino acid mutations by homologous recombination in bacteria. These mutations are a leucine to alanine change at position 234 (EU numbering) and a leucine to alanine change at position 235 (Lund et al. (1991) J. Immunol. 147: 2657). The variable light chain region is inserted in-frame with the human kappa constant region by homologous recombination. Bacterial colonies are isolated and plasmid DNA extracted. cDNA inserts are sequenced in their entirety. Correct humanized heavy and light chains corresponding to each antibody are co-transfected into COS cells to transiently produce full-length humanized anti-human antibodies. Cell supernatants containing recombinant chimeric antibody are purified by Protein A Sepharose chromatography and bound antibody is eluted by addition of acid buffer. Antibodies are neutralized and dialyzed into PBS.

### Example 1.2.2.3

### Characterization of Humanized Antibodies

[0447] The ability of purified humanized antibodies to inhibit a functional activity is determined, e.g., using the cytokine bioassay as described in Examples 1.1.2.A. The binding affinities of the humanized antibodies to recombinant human antigen are determined using surface plasmon resonance (Biacore®) measurement as described in Example 1.1.1.B. The IC₅₀ values from the bioassays and the affinity of the humanized antibodies are ranked. The humanized mAbs that fully maintain the activity of the parental hybridoma mAbs are selected as candidates for future development. The top 2-3 most favorable humanized mAbs are further characterized.

### Example 1.2.2.3.A

### Pharmacokinetic Analysis of Humanized Antibodies

[0448] Pharmacokinetic studies are carried out in Sprague-Dawley rats and cynomolgus monkeys. Male and female rats and cynomolgus monkeys are dosed intravenously or subcutaneously with a single dose of 4 mg/kg mAb and samples are analyzed using antigen capture ELISA, and pharmacokinetic parameters are determined by noncompartmental analysis. Briefly, ELISA plates are coated with goat anti-biotin antibody (5 mg/ml, 4° C., overnight), blocked with Superblock (Pierce), and incubated with biotinylated human antigen at 50 ng/ml in 10% Superblock TTBS at room temperature for 2 hours. Serum samples are serially diluted (0.5% serum, 10% Superblock in TTBS) and incubated on the plate for 30 minutes at room temperature. Detection is carried out with HRP-labeled goat anti human antibody and concentrations are determined with the help of standard curves using the four parameter logistic fit. Values for the pharmacokinetic parameters are determined by non-compartmental model using WinNonlin software (Pharsight Corporation, Mountain View, Calif.). Humanized mAbs with good pharmacokinetics profile (T1/2 is 8-13 days or better, with low clearance and excellent bioavailability 50-100%) are selected.

### Example 1.2.2.3.B

### Physicochemical and In Vitro Stability Analysis of Humanized Monoclonal Antibodies

### Size Exclusion Chromatography

[0449] Antibodies are diluted to 2.5 mg/mL with water and 20 mL is analyzed on a Shimadzu HPLC system using a TSK gel G3000 SWXL column (Tosoh Bioscience, cat#k5539-05k). Samples are eluted from the column with 211 mM sodium sulfate, 92 mM sodium phosphate, pH 7.0, at a flow rate of 0.3 mL/minutes. The HPLC system operating conditions are the following:

[0450] Mobile phase: 211 mM Na₂SO₄, 92 mM Na₂HPO₄*7H₂O, pH 7.0

[0451] Gradient: Isocratic

[0452] Flow rate: 0.3 mL/minute

[0453] Detector wavelength: 280 nm

[0454] Autosampler cooler temp: 4° C.

[0455] Column oven temperature: Ambient

[0456] Run time: 50 minutes

[0457] The purity data for the DVD-Igs is shown in Table 9.

TABLE 9
Purity of Parent Antibodies and DVD-Ig Constructs as
Determined by Size Exclusion Chromatography

| | | | HC | LC | Other DVD | % monomer |
|---|---|---|---|---|---|---|
| DVD ID | Sequence ID | Position | Linker | Linker | Domain | (purity) |
| DVD774 | EGFR (seq. 2) | C-term | Long | Long | CD3 | 85 |
| DVD773 | EGFR (seq. 2) | N-term | Long | Long | CD3 | 97 |
| DVD804 | EGFR (seq. 2) | C-term | Long | Short | CD3 | 87 |
| DVD803 | EGFR (seq. 2) | N-term | Long | Short | CD3 | 91 |
| DVD332 | EGFR (seq. 2) | C-term | Short | Short | CD3 | 91 |
| DVD331 | EGFR (seq. 2) | N-term | Short | Short | CD3 | 99 |
| DVD834 | EGFR (seq. 2) | C-term | Short | Long | CD3 | 82 |
| DVD833 | EGFR (seq. 2) | N-term | Short | Long | CD3 | 99 |
| DVD322 | EGFR (seq. 2) | C-term | Short | Short | EGFR (seq. 1) | 97.8 |
| DVD321 | EGFR (seq. 2) | N-term | Short | Short | EGFR (seq. 1) | 94.4 |
| DVD766 | EGFR (seq. 2) | C-term | Long | Long | EGFR (seq. 1) | 95.1 |
| DVD765 | EGFR (seq. 2) | N-term | Long | Long | EGFR (seq. 1) | 92.5 |
| DVD796 | EGFR (seq. 2) | C-term | Long | Short | EGFR (seq. 1) | 97.9 |
| DVD795 | EGFR (seq. 2) | N-term | Long | Short | EGFR (seq. 1) | 96.2 |
| DVD826 | EGFR (seq. 2) | C-term | Short | Long | EGFR (seq. 1) | 95.7 |
| DVD825 | EGFR (seq. 2) | N-term | Short | Long | EGFR (seq. 1) | 95.0 |

[0458] DVD-Igs showed an excellent SEC profile with most DVD-Ig showing >90% monomer. This DVD-Ig profile is similar to that observed for parent antibodies.

### SDS-PAGE

[0459] Antibodies are analyzed by sodium dodecyl sulfate-polyacrylamide gel electrophoresis (SDS-PAGE) under both reducing and non-reducing conditions. Adalimumab lot AFP04C is used as a control. For reducing conditions, the samples are mixed 1:1 with 2× tris glycine SDS-PAGE sample buffer (Invitrogen, cat#LC2676, lot#1323208) with 100 mM DTT, and heated at 60° C. for 30 minutes. For non-reducing conditions, the samples are mixed 1:1 with sample buffer and heated at 100° C. for 5 minutes. The reduced samples (10 mg per lane) are loaded on a 12% pre-cast tris-glycine gel (Invitrogen, cat#EC6005box, lot#6111021), and the non-reduced samples (10 mg per lane) are loaded on an 8%-16% pre-cast tris-glycine gel (Invitrogen, cat#EC6045box, lot#6111021). SeeBlue Plus 2 (Invitrogen, cat#LC5925, lot#1351542) is used as a molecular weight marker. The gels are run in a XCell SureLock mini cell gel box (Invitrogen, cat#E10001) and the proteins are separated by first applying a voltage of 75 to stack the samples in the gel, followed by a constant voltage of 125 until the dye front reached the bottom of the gel. The running buffer used is 1× tris glycine SDS buffer, prepared from a 10× tris glycine SDS buffer (ABC, MPS-79-080106)). The gels are stained overnight with colloidal blue stain (Invitrogen cat#46-7015, 46-7016) and destained with Milli-Q water until the background is clear. The stained gels are then scanned using an Epson Expression scanner (model 1680, S/N DASX003641).

### Sedimentation Velocity Analysis

[0460] Antibodies are loaded into the sample chamber of each of three standard two-sector carbon epon centerpieces. These centerpieces have a 1.2 cm optical path length and are built with sapphire windows. PBS is used for a reference buffer and each chamber contained 140 pt. All samples are examined simultaneously using a 4-hole (AN-60Ti) rotor in a Beckman ProteomeLab XL-I analytical ultracentrifuge (serial #PL106C01).

[0461] Run conditions are programmed and centrifuge control is performed using ProteomeLab (v5.6). The samples and rotor are allowed to thermally equilibrate for one hour prior to analysis (20.0±0.1° C.). Confirmation of proper cell loading is performed at 3000 rpm and a single scan is recorded for each cell. The sedimentation velocity conditions are the following:

[0462] Sample Cell Volume: 420 mL

[0463] Reference Cell Volume: 420 mL

[0464] Temperature: 20° C.

[0465] Rotor Speed: 35,000 rpm

[0466] Time: 8:00 hours

[0467] UV Wavelength: 280 nm

[0468] Radial Step Size: 0.003 cm

[0469] Data Collection One data point per step without signal averaging.

[0470] Total Number of Scans: 100

### LC-MS Molecular Weight Measurement of Intact Antibodies

[0471] Molecular weight of intact antibodies are analyzed by LC-MS. Each antibody is diluted to approximately 1 mg/mL with water. An 1100 HPLC (Agilent) system with a protein microtrap (Michrom Bioresources, Inc, cat#004/25109/03) is used to desalt and introduce 5 mg of the sample into an API Qstar pulsar i mass spectrometer (Applied Biosystems). A short gradient is used to elute the samples. The gradient is run with mobile phase A (0.08% FA, 0.02% TFA in HPLC water) and mobile phase B (0.08% FA and 0.02% TFA in acetonitrile) at a flow rate of 50 mL/minute. The mass spectrometer is operated at 4.5 kvolts spray voltage with a scan range from 2000 to 3500 mass to charge ratio.

### LC-MS Molecular Weight Measurement of Antibody Light and Heavy Chains

[0472] Molecular weight measurement of antibody light chain (LC), heavy chain (HC) and deglycosylated HC are analyzed by LC-MS. Antibody is diluted to 1 mg/mL with water and the sample is reduced to LC and HC with a final concentration of 10 mM DTT for 30 minutes at 37° C. To deglycosylate the antibody, 100 mg of the antibody is incubated with 2 mL of PNGase F, 5 mL of 10% N-octylglucoside in a total volume of 100 mL overnight at 37° C. After deglycosylation the sample is reduced with a final concentration of 10 mM DTT for 30 minutes at 37° C. An Agilent 1100 HPLC system with a C4 column (Vydac, cat#214TP5115, S/N 060206537204069) is used to desalt and introduce the sample (5 mg) into an API Qstar pulsar i mass spectrometer (Applied Biosystems). A short gradient is used to elute the sample. The gradient is run with mobile phase A (0.08% FA, 0.02% TFA in HPLC water) and mobile phase B (0.08% FA and 0.02% TFA in acetonitrile) at a flow rate of 50 mL/minute. The mass spectrometer is operated at 4.5 kvolts spray voltage with a scan range from 800 to 3500 mass to charge ratio.

### Peptide Mapping

[0473] Antibody is denatured for 15 minutes at room temperature with a final concentration of 6 M guanidine hydrochloride in 75 mM ammonium bicarbonate. The denatured samples are reduced with a final concentration of 10 mM DTT at 37° C. for 60 minutes, followed by alkylation with 50 mM iodoacetic acid (IAA) in the dark at 37° C. for 30 minutes. Following alkylation, the sample is dialyzed overnight against four liters of 10 mM ammonium bicarbonate at 4° C. The dialyzed sample is diluted to 1 mg/mL with 10 mM ammonium bicarbonate, pH 7.8 and 100 mg of antibody is either digested with trypsin (Promega, cat#V5111) or Lys-C (Roche, cat#11 047 825 001) at a 1:20 (w/w) trypsin/Lys-C:antibody ratio at 37° C. for 4 hrs. Digests are quenched with 1 mL of 1 N HCl. For peptide mapping with mass spectrometer detection, 40 mL of the digests are separated by reverse phase high performance liquid chromatography (RPHPLC) on a C18 column (Vydac, cat#218TP51, S/N NE9606 10.3.5) with an Agilent 1100 HPLC system. The peptide separation is run with a gradient using mobile phase A (0.02% TFA and 0.08% FA in HPLC grade water) and mobile phase B (0.02% TFA and 0.08% FA in acetonitrile) at a flow rate of 50 mL/minutes. The API QSTAR Pulsar i mass spectromer is operated in positive mode at 4.5 kvolts spray voltage and a scan range from 800 to 2500 mass to charge ratio.

### Disulfide Bond Mapping

[0474] To denature the antibody, 100 mL of the antibody is mixed with 300 mL of 8 M guanidine HCl in 100 mM ammonium bicarbonate. The pH is checked to ensure that it is between 7 and 8 and the samples are denatured for 15 minutes at room temperature in a final concentration of 6 M guanidine HCl. A portion of the denatured sample (100 mL) is diluted to 600 mL with Milli-Q water to give a final guanidine-HCl concentration of 1 M. The sample (220 mg) is digested with either trypsin (Promega, cat #V5111, lot#22265901) or Lys-C (Roche, cat#11047825001, lot#12808000) at a 1:50 trypsin or 1:50 Lys-C: antibody (w/w) ratios (4.4 mg enzyme: 220 mg sample) at 37° C. for approximately 16 hours. An additional 5 mg of trypsin or Lys-C is added to the samples and digestion is allowed to proceed for an additional 2 hours at 37° C. Digestions are stopped by adding 1 mL of TFA to each sample. Digested samples are separated by RPHPLC using a C18 column (Vydac, cat#218TP51 S/N NE020630-4-1A) on an Agilent HPLC system. The separation is run with the same gradient used for peptide mapping using mobile phase A (0.02% TFA and 0.08% FA in HPLC grade water) and mobile phase B (0.02% TFA and 0.08% FA in acetonitrile) at a flow rate of 50 mL/minute. The HPLC operating conditions are the same as those used for peptide mapping. The API QSTAR Pulsar i mass spectromer is operated in positive mode at 4.5 kvolts spray voltage and a scan range from 800 to 2500 mass-to-charge ratio. Disulfide bonds are assigned by matching the observed MWs of peptides with the predicted MWs of tryptic or Lys-C peptides linked by disulfide bonds.

### Free Sulfhydryl Determination

[0475] The method used to quantify free cysteines in an antibody is based on the reaction of Ellman's reagent, 5,5¢-dithio-bis(2-nitrobenzoic acid) (DTNB), with sulfhydryl groups (SH) which gives rise to a characteristic chromophoric product, 5-thio-(2-nitrobenzoic acid) (TNB). The reaction is illustrated in the formula:

DTNB+RSH®RS-TNB+TNB−+H+

[0476] The absorbance of the TNB− is measured at 412 nm using a Cary 50 spectrophotometer. An absorbance curve is plotted using dilutions of 2 mercaptoethanol (b-ME) as the free SH standard and the concentrations of the free sulfhydryl groups in the protein are determined from absorbance at 412 nm of the sample.

[0477] The b-ME standard stock is prepared by a serial dilution of 14.2 M b-ME with HPLC grade water to a final concentration of 0.142 mM. Then standards in triplicate for each concentration are prepared. Antibody is concentrated to 10 mg/mL using an amicon ultra 10,000 MWCO centrifugal filter (Millipore, cat#UFC801096, lot#L3KN5251) and the buffer is changed to the formulation buffer used for adalimumab (5.57 mM sodium phosphate monobasic, 8.69 mM sodium phosphate dibasic, 106.69 mM NaCl, 1.07 mM sodium citrate, 6.45 mM citric acid, 66.68 mM mannitol, pH 5.2, 0.1% (w/v) Tween). The samples are mixed on a shaker at room temperature for 20 minutes. Then 180 mL of 100 mM Tris buffer, pH 8.1 is added to each sample and standard followed by the addition of 300 mL of 2 mM DTNB in 10 mM phosphate buffer, pH 8.1. After thorough mixing, the samples and standards are measured for absorption at 412 nm on a Cary 50 spectrophotometer. The standard curve is obtained by plotting the amount of free SH and OD₄₁₂ nm of the b-ME standards. Free SH content of samples are calculated based on this curve after subtraction of the blank.

### Weak Cation Exchange Chromatography

[0478] Antibody is diluted to 1 mg/mL with 10 mM sodium phosphate, pH 6.0. Charge heterogeneity is analyzed using a Shimadzu HPLC system with a WCX-10 ProPac analytical column (Dionex, cat#054993, S/N 02722). The samples are loaded on the column in 80% mobile phase A (10 mM sodium phosphate, pH 6.0) and 20% mobile phase B (10 mM sodium phosphate, 500 mM NaCl, pH 6.0) and eluted at a flow rate of 1.0 mL/minute.

### Oligosaccharide Profiling

[0479] Oligosaccharides released after PNGase F treatment of antibody are derivatized with 2-aminobenzamide (2-AB) labeling reagent. The fluorescent-labeled oligosaccharides are separated by normal phase high performance liquid chromatography (NPHPLC) and the different forms of oligosaccharides are characterized based on retention time comparison with known standards.

[0480] The antibody is first digested with PNGaseF to cleave N-linked oligosaccharides from the Fc portion of the heavy chain. The antibody (200 mg) is placed in a 500 mL Eppendorf tube along with 2 mL PNGase F and 3 mL of 10% N-octylglucoside. Phosphate buffered saline is added to bring the final volume to 60 mL. The sample is incubated overnight at 37° C. in an Eppendorf thermomixer set at 700 RPM. Adalimumab lot AFPO₄C is also digested with PNGase F as a control.

[0481] After PNGase F treatment, the samples are incubated at 95° C. for 5 minutes in an

[0482] Eppendorf thermomixer set at 750 RPM to precipitate out the proteins, then the samples are placed in an Eppendorf centrifuge for 2 minutes at 10,000 RPM to spin down the precipitated proteins. The supernatent containing the oligosaccharides are transferred to a 500 mL Eppendorf tube and dried in a speed-vac at 65° C.

[0483] The oligosaccharides are labeled with 2AB using a 2AB labeling kit purchased from Prozyme (cat#GKK-404, lot#132026). The labeling reagent is prepared according to the manufacturer's instructions. Acetic acid (150 mL, provided in kit) is added to the DMSO vial (provided in kit) and mixed by pipeting the solution up and down several times. The acetic acid/DMSO mixture (100 mL) is transferred to a vial of 2-AB dye (just prior to use) and mixed until the dye is fully dissolved. The dye solution is then added to a vial of reductant (provided in kit) and mixed well (labeling reagent). The labeling reagent (5 mL) is added to each dried oligosaccharide sample vial, and mixed thoroughly. The reaction vials are placed in an Eppendorf thermomixer set at 65° C. and 700-800 RPM for 2 hours of reaction.

[0484] After the labeling reaction, the excess fluorescent dye is removed using GlycoClean S Cartridges from Prozyme (cat#GKI-4726). Prior to adding the samples, the cartridges are washed with 1 mL of milli-Q water followed with 5 ishes of 1 mL 30% acetic acid solution. Just prior to adding the samples, 1 mL of acetonitrile (Burdick and Jackson, cat#AH015-4) is added to the cartridges.

[0485] After all of the acetonitrile passed through the cartridge, the sample is spotted onto the center of the freshly washed disc and allowed to adsorb onto the disc for 10 minutes. The disc is washed with 1 mL of acetonitrile followed by five ishes of 1 mL of 96% acetonitrile. The cartridges are placed over a 1.5 mL Eppendorf tube and the 2-AB labeled oligosaccharides are eluted with 3 ishes (400 mL each ish) of milli Q water.

[0486] The oligosaccharides are separated using a Glycosep N HPLC (cat#GKI-4728) column connected to a Shimadzu HPLC system. The Shimadzu HPLC system consisted of a system controller, degasser, binary pumps, autosampler with a sample cooler, and a fluorescent detector.

### Stability at Elevated Temperatures

[0487] The buffer of antibody is either 5.57 mM sodium phosphate monobasic, 8.69 mM sodium phosphate dibasic, 106.69 mM NaCl, 1.07 mM sodium citrate, 6.45 mM citric acid, 66.68 mM mannitol, 0.1% (w/v) Tween, pH 5.2; or 10 mM histidine, 10 mM methionine, 4% mannitol, pH 5.9 using Amicon ultra centrifugal filters. The final concentration of the antibodies is adjusted to 2 mg/mL with the appropriate buffers. The antibody solutions are then filter sterized and 0.25 mL aliquots are prepared under sterile conditions. The aliquots are left at either −80° C., 5° C., 25° C., or 40° C. for 1, 2 or 3 weeks. At the end of the incubation period, the samples are analyzed by size exclusion chromatography and SDS-PAGE.

[0488] The stability samples are analyzed by SDS-PAGE under both reducing and non-reducing conditions. The procedure used is the same as described herein. The gels are stained overnight with colloidal blue stain (Invitrogen cat#46-7015, 46-7016) and destained with Milli-Q water until the background is clear. The stained gels are then scanned using an Epson Expression scanner (model 1680, S/N DASX003641). To obtain more sensitivity, the same gels are silver stained using silver staining kit (Owl Scientific) and the recommended procedures given by the manufacturer is used.

### Example 1.2.2.3.C

### Efficacy of a Humanized Monoclonal Antibody by Itself or in Combination with Chemotherapy on the Growth of Human Carcinoma Xenografts

[0489] Human cancer cells are grown in vitro to 99% viability, 85% confluence in tissue culture flasks. SCID female or male mice (Charles Rivers Labs) at 19-25 grams, are ear tagged and shaved. Mice are then inoculated subcutaneously into the right flank with 0.2 ml of 2×10⁶ human tumor cells (1:1 matrigel) on study day 0. Administration (IP, Q3D/week) of vehicle

[0490] (PBS), humanized antibody, and/or chemotherapy is initiated after mice are size matched into separate cages of mice with mean tumor volumes of approximately 150 to 200 mm³. The tumors are measured by a pair of calipers twice a week starting on approximately day 10 post inoculation and the tumor volumes calculated according to the formula V=L×W²/2 (V: volume, mm³; L: length, mm; W: width, m) Reduction in tumor volume is seen in animals treated with mAb alone or in combination with chemotherapy relative to tumors in animals that received only vehicle or an isotype control mAb.

### Example 1.4

### Generation of a DVD-Ig

[0491] DVD-Ig molecules capable of binding two antigens are constructed using two parent monoclonal antibodies, one against human antigen A, and the other against human antigen B, selected as described herein.

### Example 1.4.1

### Generation of a DVD-Ig Having Two Linker Lengths

[0492] A constant region containing γ1 Fc with mutations at 234, and 235 to eliminate ADCC/CDC effector functions is used. Four different anti-A/B DVD-Ig constructs are generated: 2 with short linker and 2 with long linker, each in two different domain orientations: V_{A}-V_{B}-C and V_{B}-V_{A}-C (see Table 8). The linker sequences, derived from the N-terminal sequence of human Cl/Ck or CH1 domain, are as follows:

[0493] For DVDAB constructs:

[0494] light chain (if anti-A has 4Short linker: QPKAAP (SEQ ID NO: 15); Long linker: QPKAAPSVTLFPP (SEQ ID NO: 16)

[0495] light chain (if anti-A has 10:Short linker: TVAAP (SEQ ID NO: 13); Long linker: TVAAPSVFIFPP (SEQ ID NO: 14)

[0496] heavy chain (γ1): Short linker: ASTKGP (SEQ ID NO: 21); Long linker: ASTKGPSVFPLAP (SEQ ID NO: 22)

[0497] For DVDBA constructs:

[0498] light chain (if anti-B has λ):Short linker: QPKAAP (SEQ ID NO: 15); Long linker: QPKAAPSVTLFPP (SEQ ID NO: 16)

[0499] light chain (if anti-B has k):Short linker: TVAAP (SEQ ID NO: 13); Long linker: TVAAPSVFIFPP (SEQ ID NO: 14)

[0500] heavy chain (γ1): Short linker: ASTKGP (SEQ ID NO: 21); Long linker: ASTKGPSVFPLAP (SEQ ID NO: 22)

[0501] Heavy and light chain constructs are subcloned into the pBOS expression vector, and expressed in COS cells, followed by purification by Protein A chromatography. The purified materials are subjected to SDS-PAGE and SEC analysis.

[0502] The Table 10 below describes the heavy chain and light chain constructs used to express each anti-A/B DVD-Ig protein.

TABLE 10
Constructs to Express Anti-A/B DVD-Ig Proteins

| DVD-Ig protein | Heavy chain construct | Light chain construct |
|---|---|---|
| DVDABSL | DVDABHC-SL | DVDABLC-SL |
| DVDABLL | DVDABHC-LL | DVDABLC-LL |
| DVDBASL | DVDBAHC-SL | DVDBALC-SL |
| DVDBALL | DVDBAHC-LL | DVDBALC-LL |

### Example 1.4.2

### Molecular Cloning of DNA Constructs for DVDABSL and DVDABLL

[0503] To generate heavy chain constructs DVDABHC-LL and DVDABHC-SL, VH domain of A antibody is PCR amplified using specific primers (3′ primers contain short/long liner sequence for SL/LL constructs, respectively); meanwhile VH domain of B antibody is amplified using specific primers (5′ primers contains short/long liner sequence for SL/LL constructs, respectively). Both PCR reactions are performed according to standard PCR techniques and procedures. The two PCR products are gel-purified, and used together as overlapping template for the subsequent overlapping PCR reaction. The overlapping PCR products are subcloned into Srf I and Sal I double digested pBOS-hCγ1,z non-a mammalian expression vector (Abbott) by using standard homologous recombination approach.

[0504] To generate light chain constructs DVDABLC-LL and DVDABLC-SL, VL domain of A antibody is PCR amplified using specific primers (3′ primers contain short/long liner sequence for SL/LL constructs, respectively); meanwhile VL domain of B antibody is amplified using specific primers (5′ primers contains short/long liner sequence for SL/LL constructs, respectively). Both PCR reactions are performed according to standard PCR techniques and procedures. The two PCR products are gel-purified, and used together as overlapping template for the subsequent overlapping PCR reaction using standard PCR conditions. The overlapping PCR products are subcloned into Srf I and Not I double digested pBOS-hCk mammalian expression vector (Abbott) by using standard homologous recombination approach. Similar approach has been used to generate DVDBASL and DVDBALL as described below:

### Example 1.4.3

### Molecular Cloning of DNA Constructs for DVDBASL and DVDBALL

[0505] To generate heavy chain constructs DVDBAHC-LL and DVDBAHC-SL, VH domain of antibody B is PCR amplified using specific primers (3′ primers contain short/long liner sequence for SL/LL constructs, respectively); meanwhile VH domain of antibody A is amplified using specific primers (5′ primers contains short/long liner sequence for SL/LL constructs, respectively). Both PCR reactions are performed according to standard PCR techniques and procedures. The two PCR products are gel-purified, and used together as overlapping template for the subsequent overlapping PCR reaction using standard PCR conditions. The overlapping PCR products are subcloned into Srf I and Sal I double digested pBOS-hCγ1,z non-a mammalian expression vector (Abbott) by using standard homologous recombination approach.

[0506] To generate light chain constructs DVDBALC-LL and DVDBALC-SL, VL domain of antibody B is PCR amplified using specific primers (3′ primers contain short/long liner sequence for SL/LL constructs, respectively); meanwhile VL domain of antibody A is amplified using specific primers (5′ primers contains short/long liner sequence for SL/LL constructs, respectively). Both PCR reactions are performed according to standard PCR techniques and procedures. The two PCR products are gel-purified, and used together as overlapping template for the subsequent overlapping PCR reaction using standard PCR conditions. The overlapping PCR products are subcloned into SrfI and Not I double digested pBOS-hCk mammalian expression vector (Abbott) by using standard homologous recombination approach.

### Example 1.4.4

### Construction and Expression of Additional DVD-Ig

### Example 1.4.4.1

### Preparation of DVD-12 Vector Constructs

[0507] Parent antibody amino acid sequences for specific antibodies, which recognize specific antigens or epitopes thereof, for incorporation into a DVD-Ig can be obtained by preparation of hybridomas as described above or can be obtained by sequencing known antibody proteins or nucleic acids. In addition, known sequences can be obtained from the literature. The sequences can be used to synthesize nucleic acids using standard DNA synthesis or amplification technologies and assembling the desired antibody fragments into expression vectors, using standard recombinant DNA technology, for expression in cells.

[0508] DVD-Ig sequences are cloned into a pHyb-C vector or a pHyb-E vector (see U.S. Patent Application Ser. No. 61/021,282) according to standard methods.

[0509] The pHyb-C vector includes an SV40 eukaryotic origin of replication, a cytomegalovirus eukaryotic expression promoter (pCMV), a Tripartite leader sequence (TPL), a splice donor site (SD), an Adenovirus major late enhancer element (enh MLP), a splice acceptor site (SA), an open reading frame (ORF) region for a gene of interest followed by a poly A signal (pA), a dyad symmetry element (DS), an Epstein Barr virus-derived eukaryotic origin of replication (OriP), a repeat region (FR), an ampillicin resistance marker (AmpR) and a bacterial origin of replication (pMB1ori).

[0510] The pHyb-E vector includes a SV-40 eukaryotic origin of replication, an EF-1a eukaryotic promoter, an open reading frame (ORF) region for a gene of interest followed by a poly A signal (pA), a dyad symmetry element (DS), an Epstein Barr virus-derived eukaryotic origin of replication (OriP), a repeat region (FR), an ampillicin resistance marker (AmpR) and a bacterial origin of replication (pMB1ori). Exemplary pHyb-E vectors include the pHybE-hCk, pHybE-hCl, and pHybE-hCgl,z,non-a (see U.S. Patent Application Ser. No. 61/021,282).

### Example 1.4.4.2

### Transfection and Expression in 293 Cells

[0511] The DVD-Ig vector constructs are transfected into 293 cells for production of DVD-Ig protein. The 293 transient transfection procedure used is a modification of the methods published in Durocher et al. (2002) Nucl. Acids Res. 30(2): E9 and Pham et al. (2005) Biotech. Bioengineering 90(3): 332-44. Reagents that were used in the transfection included:
[0512] HEK 293-6E cells (human embryonic kidney cell line stably expressing EBNA1; obtained from National Research Council Canada) cultured in disposable Erlenmeyer flasks in a humidified incubator set at 130 rpm, 37° C. and 5% CO₂.
[0513] Culture medium: FreeStyle 293 Expression Medium (Invitrogen 12338-018) plus 25 μg/mL Geneticin (G418) (Invitrogen 10131-027) and 0.1% Pluronic F-68 (Invitrogen 24040-032).
[0514] Transfection medium: FreeStyle 293 Expression Medium plus 10 mM HEPES (Invitrogen 15630-080).
[0515] Polyethylenimine (PEI) stock: 1 mg/mL sterile stock solution, pH 7.0, prepared with linear 25 kDa PEI (Polysciences) and stored at less than −15° C.
[0516] Tryptone Feed Medium: 5% w/v sterile stock of Tryptone N1 (Organotechnie, 19554) in FreeStyle 293 Expression Medium.

### Cell Preparation for Transfection:

[0517] Approximately 2-4 hours prior to transfection, HEK 293-6E cells are harvested by centrifugation and resuspended in culture medium at a cell density of approximately 1 million viable cells per mL. For each transfection, 40 mL of the cell suspension is transferred into a disposable 250-mL Erlenmeyer flask and incubated for 2-4 hours.

### Transfection:

[0518] The transfection medium and PEI stock are prewarmed to room temperature (RT). For each transfection, 25 μg of plasmid DNA and 50 μg of polyethylenimine (PEI) are combined in 5 mL of transfection medium and incubated for 15-20 minutes at RT to allow the DNA:PEI complexes to form. For the BR3-Ig transfections, 25 μg of BR3-Ig plasmid is used per transfection. Each 5-mL DNA:PEI complex mixture is added to a 40-mL culture prepared previously and returned to the humidified incubator set at 130 rpm, 37° C. and 5% CO₂. After 20-28 hours, 5 mL of Tryptone Feed Medium is added to each transfection and the cultures are continued for six days.

[0519] The expression profile for the DVD-Igs is shown in Table 11.

TABLE 11
Transient HEK293 Expression Yields of EGFR (seq. 2)
Containing Antibodies and DVD-Igs

| | | | | | | Expression |
|---|---|---|---|---|---|---|
| | | | HC | LC | Other DVD | Yield |
| DVD ID | Sequence ID | Position | Linker | Linker | Domain | (mg/L) |
| AB064 | EGFR (seq. 2) | | | — | — | 47.2 |
| AB002 | CD3 | | | — | — | 67.2 |
| AB015 | DLL-4 | | | — | — | 57.6 |
| AB033 | EGFR (seq. 1) | | | — | — | 44.4 |
| AB116 | ErbB3 (seq. 3) | | | — | — | 61.0 |
| AB063 | ErbB3 (seq. 2) | | | — | — | 37.8 |
| AB062 | ErbB3 (seq. 1) | | | — | — | 24.6 |
| AB012 | HGF | | | — | — | 22.8 |
| AB011 | IGF1R | | | — | — | 57.0 |
| AB119 | MTX (4-351-178) | | | — | — | 1.6 |
| AB121 | NKG2D (KYK-2.0) | | | — | — | 32.8 |
| AB047 | PlGF | | | — | — | 23.6 |
| | (ThromboGenix) | | | | | |
| AB005 | RON | | | — | — | 67.4 |
| AB014 | VEGF (seq. 1) | | | — | — | 52.4 |
| AB117 | VEGF (seq. 3) | | | — | — | 70.8 |
| AB070 | VEGF (seq. 2) | | | — | — | 1.2 |
| DVD774 | EGFR (seq. 2) | C-term | Long | Long | CD3 | 3.8 |
| DVD773 | EGFR (seq. 2) | N-term | Long | Long | CD3 | 0.6 |
| DVD804 | EGFR (seq. 2) | C-term | Long | Short | CD3 | 2.6 |
| DVD803 | EGFR (seq. 2) | N-term | Long | Short | CD3 | 40.6 |
| DVD332 | EGFR (seq. 2) | C-term | Short | Short | CD3 | 1.0 |
| DVD331 | EGFR (seq. 2) | N-term | Short | Short | CD3 | 31.0 |
| DVD834 | EGFR (seq. 2) | C-term | Short | Long | CD3 | 3.0 |
| DVD833 | EGFR (seq. 2) | N-term | Short | Long | CD3 | 1.7 |
| DVD782 | EGFR (seq. 2) | C-term | Long | Long | DLL-4 | 16.6 |
| DVD781 | EGFR (seq. 2) | N-term | Long | Long | DLL-4 | 55.0 |
| DVD812 | EGFR (seq. 2) | C-term | Long | Short | DLL-4 | 44.4 |
| DVD811 | EGFR (seq. 2) | N-term | Long | Short | DLL-4 | 43.8 |
| DVD340 | EGFR (seq. 2) | C-term | Short | Short | DLL-4 | 48.4 |
| DVD339 | EGFR (seq. 2) | N-term | Short | Short | DLL-4 | 23.6 |
| DVD842 | EGFR (seq. 2) | C-term | Short | Long | DLL-4 | 28.6 |
| DVD841 | EGFR (seq. 2) | N-term | Short | Long | DLL-4 | 48.2 |
| DVD766 | EGFR (seq. 2) | C-term | Long | Long | EGFR (seq. 1) | 7.8 |
| DVD765 | EGFR (seq. 2) | N-term | Long | Long | EGFR (seq. 1) | 7.0 |
| DVD796 | EGFR (seq. 2) | C-term | Long | Short | EGFR (seq. 1) | 15.6 |
| DVD795 | EGFR (seq. 2) | N-term | Long | Short | EGFR (seq. 1) | 26.6 |
| DVD322 | EGFR (seq. 2) | C-term | Short | Short | EGFR (seq. 1) | 12.4 |
| DVD321 | EGFR (seq. 2) | N-term | Short | Short | EGFR (seq. 1) | 15.6 |
| DVD826 | EGFR (seq. 2) | C-term | Short | Long | EGFR (seq. 1) | 13.6 |
| DVD825 | EGFR (seq. 2) | N-term | Short | Long | EGFR (seq. 1) | 12.4 |
| DVD788 | EGFR (seq. 2) | C-term | Long | Long | ErbB3 (seq. 3) | 42.0 |
| DVD787 | EGFR (seq. 2) | N-term | Long | Long | ErbB3 (seq. 3) | 32.8 |
| DVD818 | EGFR (seq. 2) | C-term | Long | Short | ErbB3 (seq. 3) | 45.0 |
| DVD817 | EGFR (seq. 2) | N-term | Long | Short | ErbB3 (seq. 3) | 29.8 |
| DVD756 | EGFR (seq. 2) | C-term | Short | Short | ErbB3 (seq. 3) | 41.0 |
| DVD755 | EGFR (seq. 2) | N-term | Short | Short | ErbB3 (seq. 3) | 22.4 |
| DVD848 | EGFR (seq. 2) | C-term | Short | Long | ErbB3 (seq. 3) | 37.6 |
| DVD847 | EGFR (seq. 2) | N-term | Short | Long | ErbB3 (seq. 3) | 34.0 |
| DVD772 | EGFR (seq. 2) | C-term | Long | Long | ErbB3 (seq. 2) | 0.9 |
| DVD771 | EGFR (seq. 2) | N-term | Long | Long | ErbB3 (seq. 2) | 15.2 |
| DVD802 | EGFR (seq. 2) | C-term | Long | Short | ErbB3 (seq. 2) | 0.9 |
| DVD801 | EGFR (seq. 2) | N-term | Long | Short | ErbB3 (seq. 2) | 22.4 |
| DVD330 | EGFR (seq. 2) | C-term | Short | Short | ErbB3 (seq. 2) | 1.2 |
| DVD329 | EGFR (seq. 2) | N-term | Short | Short | ErbB3 (seq. 2) | 16.6 |
| DVD832 | EGFR (seq. 2) | C-term | Short | Long | ErbB3 (seq. 2) | 0.5 |
| DVD831 | EGFR (seq. 2) | N-term | Short | Long | ErbB3 (seq. 2) | 15.0 |
| DVD770 | EGFR (seq. 2) | C-term | Long | Long | ErbB3 (seq. 1) | 17.4 |
| DVD769 | EGFR (seq. 2) | N-term | Long | Long | ErbB3 (seq. 1) | 16.2 |
| DVD800 | EGFR (seq. 2) | C-term | Long | Short | ErbB3 (seq. 1) | 15.6 |
| DVD799 | EGFR (seq. 2) | N-term | Long | Short | ErbB3 (seq. 1) | 26.4 |
| DVD328 | EGFR (seq. 2) | C-term | Short | Short | ErbB3 (seq. 1) | 7.8 |
| DVD327 | EGFR (seq. 2) | N-term | Short | Short | ErbB3 (seq. 1) | 10.2 |
| DVD830 | EGFR (seq. 2) | C-term | Short | Long | ErbB3 (seq. 1) | 17.2 |
| DVD829 | EGFR (seq. 2) | N-term | Short | Long | ErbB3 (seq. 1) | 17.2 |
| DVD778 | EGFR (seq. 2) | C-term | Long | Long | HGF | 2.0 |
| DVD777 | EGFR (seq. 2) | N-term | Long | Long | HGF | 24.8 |
| DVD808 | EGFR (seq. 2) | C-term | Long | Short | HGF | 9.8 |
| DVD807 | EGFR (seq. 2) | N-term | Long | Short | HGF | 33.6 |
| DVD336 | EGFR (seq. 2) | C-term | Short | Short | HGF | 7.6 |
| DVD335 | EGFR (seq. 2) | N-term | Short | Short | HGF | 23.8 |
| DVD838 | EGFR (seq. 2) | C-term | Short | Long | HGF | 5.8 |
| DVD837 | EGFR (seq. 2) | N-term | Short | Long | HGF | 23.4 |
| DVD776 | EGFR (seq. 2) | C-term | Long | Long | IGF1R | 0.3 |
| DVD775 | EGFR (seq. 2) | N-term | Long | Long | IGF1R | 23.4 |
| DVD806 | EGFR (seq. 2) | C-term | Long | Short | IGF1R | 4.4 |
| DVD805 | EGFR (seq. 2) | N-term | Long | Short | IGF1R | 44.8 |
| DVD334 | EGFR (seq. 2) | C-term | Short | Short | IGF1R | 18.6 |
| DVD333 | EGFR (seq. 2) | N-term | Short | Short | IGF1R | 48.0 |
| DVD836 | EGFR (seq. 2) | C-term | Short | Long | IGF1R | 0.4 |
| DVD835 | EGFR (seq. 2) | N-term | Short | Long | IGF1R | 27.8 |
| DVD1210 | EGFR (seq. 2) | C-term | Short | Short | MTX (4-351- | 0.0 |
| | | | | | 178) | |
| DVD1211 | EGFR (seq. 2) | N-term | Short | Short | MTX (4-351- | 1.9 |
| | | | | | 178) | |
| DVD1214 | EGFR (seq. 2) | C-term | Long | Long | NKG2D (KYK- | 38.4 |
| | | | | | 2.0) | |
| DVD1215 | EGFR (seq. 2) | N-term | Long | Long | NKG2D (KYK- | 19.6 |
| | | | | | 2.0) | |
| DVD784 | EGFR (seq. 2) | C-term | Long | Long | PlGF | 28.8 |
| | | | | | (ThromboGenix) | |
| DVD783 | EGFR (seq. 2) | N-term | Long | Long | PlGF | 23.2 |
| | | | | | (ThromboGenix) | |
| DVD814 | EGFR (seq. 2) | C-term | Long | Short | PlGF | 21.8 |
| | | | | | (ThromboGenix) | |
| DVD813 | EGFR (seq. 2) | N-term | Long | Short | PlGF | 28.2 |
| | | | | | (ThromboGenix) | |
| DVD342 | EGFR (seq. 2) | C-term | Short | Short | PlGF | 38.2 |
| | | | | | (ThromboGenix) | |
| DVD341 | EGFR (seq. 2) | N-term | Short | Short | PlGF | 32.2 |
| | | | | | (ThromboGenix) | |
| DVD844 | EGFR (seq. 2) | C-term | Short | Long | PlGF | 22.0 |
| | | | | | (ThromboGenix) | |
| DVD843 | EGFR (seq. 2) | N-term | Short | Long | PlGF | 24.2 |
| | | | | | (ThromboGenix) | |
| DVD768 | EGFR (seq. 2) | C-term | Long | Long | RON | 35.6 |
| DVD767 | EGFR (seq. 2) | N-term | Long | Long | RON | 44.8 |
| DVD798 | EGFR (seq. 2) | C-term | Long | Short | RON | 49.0 |
| DVD797 | EGFR (seq. 2) | N-term | Long | Short | RON | 68.4 |
| DVD326 | EGFR (seq. 2) | C-term | Short | Short | RON | 55.6 |
| DVD325 | EGFR (seq. 2) | N-term | Short | Short | RON | 32.4 |
| DVD828 | EGFR (seq. 2) | C-term | Short | Long | RON | 46.6 |
| DVD827 | EGFR (seq. 2) | N-term | Short | Long | RON | 52.6 |
| DVD780 | EGFR (seq. 2) | C-term | Long | Long | VEGF (seq. 1) | 0.1 |
| DVD779 | EGFR (seq. 2) | N-term | Long | Long | VEGF (seq. 1) | 13.2 |
| DVD810 | EGFR (seq. 2) | C-term | Long | Short | VEGF (seq. 1) | 1.4 |
| DVD809 | EGFR (seq. 2) | N-term | Long | Short | VEGF (seq. 1) | 17.8 |
| DVD338 | EGFR (seq. 2) | C-term | Short | Short | VEGF (seq. 1) | 2.0 |
| DVD337 | EGFR (seq. 2) | N-term | Short | Short | VEGF (seq. 1) | 22.0 |
| DVD840 | EGFR (seq. 2) | C-term | Short | Long | VEGF (seq. 1) | 1.6 |
| DVD839 | EGFR (seq. 2) | N-term | Short | Long | VEGF (seq. 1) | 17.2 |
| DVD792 | EGFR (seq. 2) | C-term | Long | Long | VEGF (seq. 3) | 56.4 |
| DVD791 | EGFR (seq. 2) | N-term | Long | Long | VEGF (seq. 3) | 2.4 |
| DVD822 | EGFR (seq. 2) | C-term | Long | Short | VEGF (seq. 3) | 83.0 |
| DVD821 | EGFR (seq. 2) | N-term | Long | Short | VEGF (seq. 3) | 34.4 |
| DVD760 | EGFR (seq. 2) | C-term | Short | Short | VEGF (seq. 3) | 74.4 |
| DVD759 | EGFR (seq. 2) | N-term | Short | Short | VEGF (seq. 3) | 50.4 |
| DVD852 | EGFR (seq. 2) | C-term | Short | Long | VEGF (seq. 3) | 71.6 |
| DVD851 | EGFR (seq. 2) | N-term | Short | Long | VEGF (seq. 3) | 50.2 |
| DVD790 | EGFR (seq. 2) | C-term | Long | Long | VEGF (seq. 2) | 1.3 |
| DVD789 | EGFR (seq. 2) | N-term | Long | Long | VEGF (seq. 2) | 46.0 |
| DVD820 | EGFR (seq. 2) | C-term | Long | Short | VEGF (seq. 2) | 1.6 |
| DVD819 | EGFR (seq. 2) | N-term | Long | Short | VEGF (seq. 2) | 57.0 |
| DVD758 | EGFR (seq. 2) | C-term | Short | Short | VEGF (seq. 2) | 1.1 |
| DVD757 | EGFR (seq. 2) | N-term | Short | Short | VEGF (seq. 2) | 52.4 |
| DVD850 | EGFR (seq. 2) | C-term | Short | Long | VEGF (seq. 2) | 2.4 |
| DVD849 | EGFR (seq. 2) | N-term | Short | Long | VEGF (seq. 2) | 49.8 |

[0520] All DVD-Igs expressed well in 293 cells. DVD-Igs could be easily purified over a protein A column. In most cases >5 mg/L purified DVD-Ig could be obtained easily from supernatants of 293 cells.

### Example 1.4.5

### Characterization and Lead Selection of a/B DVD-Igs

[0521] The binding affinities of anti-A/B DVD-Igs are analyzed on Biacore against both protein A and protein B. The tetravalent property of the DVD-Ig is examined by multiple binding studies on Biacore. Meanwhile, the neutralization potency of the DVD-Igs for protein A and protein B are assessed by bioassays, respectively, as described herein. The DVD-Ig molecules that best retain the affinity and potency of the original parental mAbs are selected for in-depth physicochemical and bio-analytical (rat PK) characterizations as described herein for each mAb. Based on the collection of analyses, the final lead DVD-Ig is advanced into CHO stable cell line development, and the CHO-derived material is employed in stability, pharmacokinetic and efficacy studies in cynomolgus monkey, and preformulation activities.

### Example 2

### Generation and Characterization of Dual Variable Domain Immunoglobulins (DVD-Ig)

[0522] Dual variable domain immunoglobulins (DVD-Ig) using parent antibodies with known amino acid sequences were generated by synthesizing polynucleotide fragments encoding DVD-Ig variable heavy and DVD-Ig variable light chain sequences and cloning the fragments into a pHybC-D2 vector according to Example 1.4.4.1. The DVD-Ig constructs were cloned into and expressed in 293 cells as described in Example 1, 4.4.2. The DVD-Ig protein was purified according to standard methods. Functional characteristics were determined according to the methods described in Example 1.1.1 and 1.1.2 as indicated.

[0523] The following examples each comprise a table that contains the sequences of the DVD-Ig VH and VL chains.

### Example 2.1

### Generation of EGFR (seq. 2) and EGFR (seq. 1) DVD-Igs with Linker Set 1

TABLE 12

| | DVD | Outer | Inner | |
|---|---|---|---|---|
| SEQ | Variable | Variable | Variable | |
| ID | Domain | Domain | Domain | Sequence |
| NO | Name | Name | Name | 12345678901234567890123456789012345 |
| 59 | DVD321H | AB064VH | AB033VH | QVQLQESGPGLVKPSQTLSLTCTVSGYSISSDFAW |
| | | | | NWIRQPPGKGLEWMGYISYSGNTRYQPSLKSRITI |
| | | | | SRDTSKNQFFLKLNSVTAADTATYYCVTAGRGFPY |
| | | | | WGQGTLVTVSSASTKGPQVQLKQSGPGLVQPSQSL |
| | | | | SITCTVSGFSLTNYGVHWVRQSPGKGLEWLGVIWS |
| | | | | GGNTDYNTPFTSRLSINKDNSKSQVFFKMNSLQSN |
| | | | | DTAIYYCARALTYYDYEFAYWGQGTLVTVSA |
| 60 | DVD321L | AB064VL | AB033VL | DIQMTQSPSSMSVSVGDRVTITCHSSQDINSNIGW |
| | | | | LQQKPGKSFKGLIYHGTNLDDGVPSRFSGSGSGTD |
| | | | | YTLTISSLQPEDFATYYCVQYAQFPWTFGGGTKLE |
| | | | | IKRTVAAPDILLTQSPVILSVSPGERVSFSCRASQ |
| | | | | SIGTNIHWYQQRTNGSPRLLIKYASESISGIPSRF |
| | | | | SGSGSGTDFTLSINSVESEDIADYYCQQNNNWPTT |
| | | | | FGAGTKLELKR |
| 61 | DVD322H | AB033VH | AB064VH | QVQLKQSGPGLVQPSQSLSITCTVSGFSLTNYGVH |
| | | | | WVRQSPGKGLEWLGVIWSGGNTDYNTPFTSRLSIN |
| | | | | KDNSKSQVFFKMNSLQSNDTAIYYCARALTYYDYE |
| | | | | FAYWGQGTLVTVSAASTKGPQVQLQESGPGLVKPS |
| | | | | QTLSLTCTVSGYSISSDFAWNWIRQPPGKGLEWMG |
| | | | | YISYSGNTRYQPSLKSRITISRDTSKNQFFLKLNS |
| | | | | VTAADTATYYCVTAGRGFPYWGQGTLVTVSS |
| 62 | DVD322L | AB033VL | AB064VL | DILLTQSPVILSVSPGERVSFSCRASQSIGTNIHW |
| | | | | YQQRTNGSPRLLIKYASESISGIPSRFSGSGSGTD |
| | | | | FTLSINSVESEDIADYYCQQNNNWPTTFGAGTKLE |
| | | | | LKRTVAAPDIQMTQSPSSMSVSVGDRVTITCHSSQ |
| | | | | DINSNIGWLQQKPGKSFKGLIYHGTNLDDGVPSRF |
| | | | | SGSGSGTDYTLTISSLQPEDFATYYCVQYAQFPWT |
| | | | | FGGGTKLEIKR |

### Example 2.2

### Generation of EGFR (seq. 2) and EGFR (seq. 1) DVD-IgS with Linker Set 2

TABLE 13

| | DVD | Outer | Inner | |
|---|---|---|---|---|
| SEQ | Variable | Variable | Variable | |
| ID | Domain | Domain | Domain | Sequence |
| NO | Name | Name | Name | 12345678901234567890123456789012345 |
| 63 | DVD765H | AB064VH | AB033VH | QVQLQESGPGLVKPSQTLSLTCTVSGYSISSDFAW |
| | | | | NWIRQPPGKGLEWMGYISYSGNTRYQPSLKSRITI |
| | | | | SRDTSKNQFFLKLNSVTAADTATYYCVTAGRGFPY |
| | | | | WGQGTLVTVSSASTKGPSVFPLAPQVQLKQSGPGL |
| | | | | VQPSQSLSITCTVSGFSLTNYGVHWVRQSPGKGLE |
| | | | | WLGVIWSGGNTDYNTPFTSRLSINKDNSKSQVFFK |
| | | | | MNSLQSNDTAIYYCARALTYYDYEFAYWGQGTLVT |
| | | | | VSA |
| 64 | DVD765L | AB064VL | AB033VL | DIQMTQSPSSMSVSVGDRVTITCHSSQDINSNIGW |
| | | | | LQQKPGKSFKGLIYHGTNLDDGVPSRFSGSGSGTD |
| | | | | YTLTISSLQPEDFATYYCVQYAQFPWTFGGGTKLE |
| | | | | IKRTVAAPSVFIFPPDILLTQSPVILSVSPGERVS |
| | | | | FSCRASQSIGTNIHWYQQRTNGSPRLLIKYASESI |
| | | | | SGIPSRFSGSGSGTDFTLSINSVESEDIADYYCQQ |
| | | | | NNNWPTTFGAGTKLELKR |
| 65 | DVD766H | AB033VH | AB064VH | QVQLKQSGPGLVQPSQSLSITCTVSGFSLTNYGVH |
| | | | | WVRQSPGKGLEWLGVIWSGGNTDYNTPFTSRLSIN |
| | | | | KDNSKSQVFFKMNSLQSNDTAIYYCARALTYYDYE |
| | | | | FAYWGQGTLVTVSAASTKGPSVFPLAPQVQLQESG |
| | | | | PGLVKPSQTLSLTCTVSGYSISSDFAWNWIRQPPG |
| | | | | KGLEWMGYISYSGNTRYQPSLKSRITISRDTSKNQ |
| | | | | FFLKLNSVTAADTATYYCVTAGRGFPYWGQGTLVT |
| | | | | VSS |
| 66 | DVD766L | AB033VL | AB064VL | DILLTQSPVILSVSPGERVSFSCRASQSIGTNIHW |
| | | | | YQQRTNGSPRLLIKYASESISGIPSRFSGSGSGTD |
| | | | | FTLSINSVESEDIADYYCQQNNNWPTTFGAGTKLE |
| | | | | LKRTVAAPSVFIFPPDIQMTQSPSSMSVSVGDRVT |
| | | | | ITCHSSQDINSNIGWLQQKPGKSFKGLIYHGTNLD |
| | | | | DGVPSRFSGSGSGIDYTLTISSLQPEDFATYYCVQ |
| | | | | YAQFPWTFGGGTKLEIKR |

### Example 2.3

### Generation of EGFR (seq. 2) and EGFR (seq. 1) DVD-IgS with Linker Set 3

TABLE 14

| | DVD | Outer | Inner | |
|---|---|---|---|---|
| SEQ | Variable | Variable | Variable | |
| ID | Domain | Domain | Domain | Sequence |
| NO | Name | Name | Name | 12345678901234567890123456789012345 |
| 67 | DVD795H | AB064VH | AB033VH | QVQLQESGPGLVKPSQTLSLTCTVSGYSISSDFAW |
| | | | | NWIRQPPGKGLEWMGYISYSGNTRYQPSLKSRITI |
| | | | | SRDTSKNQFFLKLNSVTAADTATYYCVTAGRGFPY |
| | | | | WGQGTLVTVSSASTKGPSVFPLAPQVQLKQSGPGL |
| | | | | VQPSQSLSITCTVSGFSLTNYGVHWVRQSPGKGLE |
| | | | | WLGVIWSGGNTDYNTPFTSRLSINKDNSKSQVFFK |
| | | | | MNSLQSNDTAIYYCARALTYYDYEFAYWGQGTLVT |
| | | | | VSA |
| 68 | DVD795L | AB064VL | AB033VL | DIQMTQSPSSMSVSVGDRVTITCHSSQDINSNIGW |
| | | | | LQQKPGKSFKGLIYHGTNLDDGVPSRFSGSGSGTD |
| | | | | YTLTISSLQPEDFATYYCVQYAQFPWTFGGGTKLE |
| | | | | IKRTVAAPDILLTQSPVILSVSPGERVSFSCRASQ |
| | | | | SIGTNIHWYQQRTNGSPRLLIKYASESISGIPSRF |
| | | | | SGSGSGTDFTLSINSVESEDIADYYCQQNNNWPTT |
| | | | | FGAGTKLELKR |
| 69 | DVD796H | AB033VH | AB064VH | QVQLKQSGPGLVQPSQSLSITCTVSGFSLTNYGVH |
| | | | | WVRQSPGKGLEWLGVIWSGGNTDYNTPFTSRLSIN |
| | | | | KDNSKSQVFFKMNSLQSNDTAIYYCARALTYYDYE |
| | | | | FAYWGQGTLVTVSAASTKGPSVFPLAPQVQLQESG |
| | | | | PGLVKPSQTLSLTCTVSGYSISSDFAWNWIRQPPG |
| | | | | KGLEWMGYISYSGNTRYQPSLKSRITISRDTSKNQ |
| | | | | FFLKLNSVTAADTATYYCVTAGRGFPYWGQGTLVT |
| | | | | VSS |
| 70 | DVD796H | AB033VL | AB064VL | DILLTQSPVILSVSPGERVSFSCRASQSIGTNIHW |
| | | | | YQQRTNGSPRLLIKYASESISGIPSRFSGSGSGTD |
| | | | | FTLSINSVESEDIADYYCQQNNNWPTTFGAGTKLE |
| | | | | LKRTVAAPDIQMTQSPSSMSVSVGDRVTITCHSSQ |
| | | | | DINSNIGWLQQKPGKSFKGLIYHGTNLDDGVPSRF |
| | | | | SGSGSGTDYTLTISSLQPEDFATYYCVQYAQFPWT |
| | | | | FGGGTKLEIKR |

### Example 2.4

### Generation of EGFR (seq. 2) and EGFR (seq. 1) DVD-IgS with Linker Set 4

TABLE 15

| | DVD | Outer | Inner | |
|---|---|---|---|---|
| SEQ | Variable | Variable | Variable | |
| ID | Domain | Domain | Domain | Sequence |
| NO | Name | Name | Name | 12345678901234567890123456789012345 |
| 71 | DVD825H | AB064VH | AB033VH | QVQLQESGPGLVKPSQTLSLTCTVSGYSISSDFAW |
| | | | | NWIRQPPGKGLEWMGYISYSGNTRYQPSLKSRITI |
| | | | | SRDTSKNQFFLKLNSVTAADTATYYCVTAGRGFPY |
| | | | | WGQGTLVTVSSASTKGPQVQLKQSGPGLVQPSQSL |
| | | | | SITCTVSGFSLTNYGVHWVRQSPGKGLEWLGVIWS |
| | | | | GGNTDYNTPFTSRLSINKDNSKSQVFFKMNSLQSN |
| | | | | DTAIYYCARALTYYDYEFAYWGQGTLVTVSA |
| 72 | DVD825L | AB064VL | AB033VL | DIQMTQSPSSMSVSVGDRVTITCHSSQDINSNIGW |
| | | | | LQQKPGKSFKGLIYHGTNLDDGVPSRFSGSGSGTD |
| | | | | YTLTISSLQPEDFATYYCVQYAQFPWTFGGGTKLE |
| | | | | IKRTVAAPSVFIFPPDILLTQSPVILSVSPGERVS |
| | | | | FSCRASQSIGTNIHWYQQRTNGSPRLLIKYASESI |
| | | | | SGIPSRFSGSGSGTDFTLSINSVESEDIADYYCQQ |
| | | | | NNNWPTTFGAGTKLELKR |
| 73 | DVD826H | AB033VH | AB064VH | QVQLKQSGPGLVQPSQSLSITCTVSGFSLTNYGVH |
| | | | | WVRQSPGKGLEWLGVIWSGGNTDYNTPFTSRLSIN |
| | | | | KDNSKSQVFFKMNSLQSNDTAIYYCARALTYYDYE |
| | | | | FAYWGQGTLVTVSAASTKGPQVQLQESGPGLVKPS |
| | | | | QTLSLTCTVSGYSISSDFAWNWIRQPPGKGLEWMG |
| | | | | YISYSGNTRYQPSLKSRITISRDTSKNQFFLKLNS |
| | | | | VTAADTATYYCVTAGRGFPYWGQGTLVTVSS |
| 74 | DVD826L | AB033VL | AB064VL | DILLTQSPVILSVSPGERVSFSCRASQSIGTNIHW |
| | | | | YQQRTNGSPRLLIKYASESISGIPSRFSGSGSGTD |
| | | | | FTLSINSVESEDIADYYCQQNNNWPTTFGAGTKLE |
| | | | | LKRTVAAPSVFIFPPDIQMTQSPSSMSVSVGDRVT |
| | | | | ITCHSSQDINSNIGWLQQKPGKSFKGLIYHGTNLD |
| | | | | DGVPSRFSGSGSGTDYTLTISSLQPEDFATYYCVQ |
| | | | | YAQFPWTFGGGTKLEIKR |

### Example 2.5

### Generation of EGFR (seq. 2) and RON DVD-IgS with Linker Set 1

TABLE 16

| | DVD | Outer | Inner | |
|---|---|---|---|---|
| SEQ | Variable | Variable | Variable | |
| ID | Domain | Domain | Domain | Sequence |
| No. | Name | Name | Name | 12345678901234567890123456789012345 |
| 75 | DVD325H | AB064VH | AB005VH | QVQLQESGPGLVKPSQTLSLTCTVSGYSISSDFAW |
| | | | | NWIRQPPGKGLEWMGYISYSGNTRYQPSLKSRITI |
| | | | | SRDTSKNQFFLKLNSVTAADTATYYCVTAGRGFPY |
| | | | | WGQGTLVTVSSASTKGPEVQLVQSGGGLVKPGGSL |
| | | | | RLSCAASGFTFSSYAMHWVRQAPGKGLEWVAVISY |
| | | | | DGSNKYYADSVKGRFTISRDNSKNTLYLQMNSLRA |
| | | | | EDTAVYYCARFSGWPNNYYYYGMDVWGQGTTVTVS |
| | | | | S |
| 76 | DVD325L | AB064VL | AB005VL | DIQMTQSPSSMSVSVGDRVTITCHSSQDINSNIGW |
| | | | | LQQKPGKSFKGLIYHGTNLDDGVPSRFSGSGSGTD |
| | | | | YTLTISSLQPEDFATYYCVQYAQFPWTFGGGTKLE |
| | | | | IKRTVAAPDVVMTQSPLSLPVTPGEPASISCRSSQ |
| | | | | SLLHSNGFNYVDWYLQKPGQSPHLLIYFGSYRASG |
| | | | | VPDRFSGSGSGTDFTLKISRVEAEDVGVYYCMQAL |
| | | | | QTPPWTFGQGTKVEIRR |
| 77 | DVD326H | AB005VH | AB064VH | EVQLVQSGGGLVKPGGSLRLSCAASGFTFSSYAMH |
| | | | | WVRQAPGKGLEWVAVISYDGSNKYYADSVKGRFTI |
| | | | | SRDNSKNTLYLQMNSLRAEDTAVYYCARFSGWPNN |
| | | | | YYYYGMDVWGQGTTVTVSSASTKGPQVQLQESGPG |
| | | | | LVKPSQTLSLTCTVSGYSISSDFAWNWIRQPPGKG |
| | | | | LEWMGYISYSGNTRYQPSLKSRITISRDTSKNQFF |
| | | | | LKLNSVTAADTATYYCVTAGRGFPYWGQGTLVTVS |
| | | | | S |
| 78 | DVD326L | AB005VL | AB064VL | DVVMTQSPLSLPVTPGEPASISCRSSQSLLHSNGF |
| | | | | NYVDWYLQKPGQSPHLLIYFGSYRASGVPDRFSGS |
| | | | | GSGTDFTLKISRVEAEDVGVYYCMQALQTPPWTFG |
| | | | | QGTKVEIRRTVAAPDIQMTQSPSSMSVSVGDRVTI |
| | | | | TCHSSQDINSNIGWLQQKPGKSFKGLIYHGTNLDD |
| | | | | GVPSRFSGSGSGTDYTLTISSLQPEDFATYYCVQY |
| | | | | AQFPWTFGGGTKLEIKR |

### Example 2.6

### Generation of EGFR (seq. 2) and RON DVD-IgS with Linker Set 2

TABLE 17

| | DVD | Outer | Inner | |
|---|---|---|---|---|
| SEQ | Variable | Variable | Variable | |
| ID | Domain | Domain | Domain | Sequence |
| NO | Name | Name | Name | 12345678901234567890123456789012345 |
| 79 | DVD767H | AB064VH | AB005VH | QVQLQESGPGLVKPSQTLSLTCTVSGYSISSDFAW |
| | | | | NWIRQPPGKGLEWMGYISYSGNTRYQPSLKSRITI |
| | | | | SRDTSKNQFFLKLNSVTAADTATYYCVTAGRGFPY |
| | | | | WGQGTLVTVSSASTKGPSVFPLAPEVQLVQSGGGL |
| | | | | VKPGGSLRLSCAASGFTFSSYAMHWVRQAPGKGLE |
| | | | | WVAVISYDGSNKYYADSVKGRFTISRDNSKNTLYL |
| | | | | QMNSLRAEDTAVYYCARFSGWPNNYYYYGMDVWGQ |
| | | | | GTTVTVSS |
| 80 | DVD767L | AB064VL | AB005VL | DIQMTQSPSSMSVSVGDRVTITCHSSQDINSNIGW |
| | | | | LQQKPGKSFKGLIYHGTNLDDGVPSRFSGSGSGTD |
| | | | | YTLTISSLQPEDFATYYCVQYAQFPWTFGGGTKLE |
| | | | | IKRTVAAPSVFIFPPDVVMTQSPLSLPVTPGEPAS |
| | | | | ISCRSSQSLLHSNGFNYVDWYLQKPGQSPHLLIYF |
| | | | | GSYRASGVPDRFSGSGSGTDFTLKISRVEAEDVGV |
| | | | | YYCMQALQTPPWTFGQGTKVEIRR |
| 81 | DVD768H | AB005VH | AB064VH | EVQLVQSGGGLVKPGGSLRLSCAASGFTFSSYAMH |
| | | | | WVRQAPGKGLEWVAVISYDGSNKYYADSVKGRFTI |
| | | | | SRDNSKNTLYLQMNSLRAEDTAVYYCARFSGWPNN |
| | | | | YYYYGMDVWGQGTTVTVSSASTKGPSVFPLAPQVQ |
| | | | | LQESGPGLVKPSQTLSLTCTVSGYSISSDFAWNWI |
| | | | | RQPPGKGLEWMGYISYSGNTRYQPSLKSRITISRD |
| | | | | TSKNQFFLKLNSVTAADTATYYCVTAGRGFPYWGQ |
| | | | | GTLVTVSS |
| 82 | DVD768L | AB005VL | AB064VL | DVVMTQSPLSLPVTPGEPASISCRSSQSLLHSNGF |
| | | | | NYVDWYLQKPGQSPHLLIYFGSYRASGVPDRFSGS |
| | | | | GSGTDFTLKISRVEAEDVGVYYCMQALQTPPWTFG |
| | | | | QGTKVEIRRTVAAPSVFIFPPDIQMTQSPSSMSVS |
| | | | | VGDRVTITCHSSQDINSNIGWLQQKPGKSFKGLIY |
| | | | | HGTNLDDGVPSRFSGSGSGTDYTLTISSLQPEDFA |
| | | | | TYYCVQYAQFPWTFGGGTKLEIKR |

### Example 2.7

### Generation of EGFR (seq. 2) and RON DVD-IgS with Linker Set 3

TABLE 18

| | DVD | Outer | Inner | |
|---|---|---|---|---|
| SEQ | Variable | Variable | Variable | |
| ID | Domain | Domain | Domain | Sequence |
| NO | Name | Name | Name | 12345678901234567890123456789012345 |
| 83 | DVD797H | AB064VH | AB005VH | QVQLQESGPGLVKPSQTLSLTCTVSGYSISSDFAW |
| | | | | NWIRQPPGKGLEWMGYISYSGNTRYQPSLKSRITI |
| | | | | SRDTSKNQFFLKLNSVTAADTATYYCVTAGRGFPY |
| | | | | WGQGTLVTVSSASTKGPSVFPLAPEVQLVQSGGGL |
| | | | | VKPGGSLRLSCAASGFTFSSYAMHWVRQAPGKGLE |
| | | | | WVAVISYDGSNKYYADSVKGRFTISRDNSKNTLYL |
| | | | | QMNSLRAEDTAVYYCARFSGWPNNYYYYGMDVWGQ |
| | | | | GTTVTVSS |
| 84 | DVD797L | AB064VL | AB005VL | DIQMTQSPSSMSVSVGDRVTITCHSSQDINSNIGW |
| | | | | LQQKPGKSFKGLIYHGTNLDDGVPSRFSGSGSGTD |
| | | | | YTLTISSLQPEDFATYYCVQYAQFPWTFGGGTKLE |
| | | | | IKRTVAAPDVVMTQSPLSLPVTPGEPASISCRSSQ |
| | | | | SLLHSNGFNYVDWYLQKPGQSPHLLIYFGSYRASG |
| | | | | VPDRFSGSGSGTDFTLKISRVEAEDVGVYYCMQAL |
| | | | | QTPPWTFGQGTKVEIRR |
| 85 | DVD798H | AB005VH | AB064VH | EVQLVQSGGGLVKPGGSLRLSCAASGFTFSSYAMH |
| | | | | WVRQAPGKGLEWVAVISYDGSNKYYADSVKGRFTI |
| | | | | SRDNSKNTLYLQMNSLRAEDTAVYYCARFSGWPNN |
| | | | | YYYYGMDVWGQGTTVTVSSASTKGPSVFPLAPQVQ |
| | | | | LQESGPGLVKPSQTLSLTCTVSGYSISSDFAWNWI |
| | | | | RQPPGKGLEWMGYISYSGNTRYQPSLKSRITISRD |
| | | | | TSKNQFFLKLNSVTAADTATYYCVTAGRGFPYWGQ |
| | | | | GTLVTVSS |
| 86 | DVD798L | AB005VL | AB064VL | DVVMTQSPLSLPVTPGEPASISCRSSQSLLHSNGF |
| | | | | NYVDWYLQKPGQSPHLLIYFGSYRASGVPDRFSGS |
| | | | | GSGTDFTLKISRVEAEDVGVYYCMQALQTPPWTFG |
| | | | | QGTKVEIRRTVAAPDIQMTQSPSSMSVSVGDRVTI |
| | | | | TCHSSQDINSNIGWLQQKPGKSFKGLIYHGTNLDD |
| | | | | GVPSRFSGSGSGTDYTLTISSLQPEDFATYYCVQY |
| | | | | AQFPWTFGGGTKLEIKR |

### Example 2.8

### Generation of EGFR (seq. 2) and RON DVD-IgS with Linker Set 4

TABLE 19

| | DVD | Outer | Inner | |
|---|---|---|---|---|
| SEQ | Variable | Variable | Variable | |
| ID | Domain | Domain | Domain | Sequence |
| NO | Name | Name | Name | 12345678901234567890123456789012345 |
| 87 | DVD827H | AB064VH | AB005VH | QVQLQESGPGLVKPSQTLSLTCTVSGYSISSDFAW |
| | | | | NWIRQPPGKGLEWMGYISYSGNTRYQPSLKSRITI |
| | | | | SRDTSKNQFFLKLNSVTAADTATYYCVTAGRGFPY |
| | | | | WGQGTLVTVSSASTKGPEVQLVQSGGGLVKPGGSL |
| | | | | RLSCAASGFTFSSYAMHWVRQAPGKGLEWVAVISY |
| | | | | DGSNKYYADSVKGRFTISRDNSKNTLYLQMNSLRA |
| | | | | EDTAVYYCARFSGWPNNYYYYGMDVWGQGTTVTVS |
| | | | | S |
| 88 | DVD827L | AB064VL | AB005VL | DIQMTQSPSSMSVSVGDRVTITCHSSQDINSNIGW |
| | | | | LQQKPGKSFKGLIYHGTNLDDGVPSRFSGSGSGTD |
| | | | | YTLTISSLQPEDFATYYCVQYAQFPWTFGGGTKLE |
| | | | | IKRTVAAPSVFIFPPDVVMTQSPLSLPVTPGEPAS |
| | | | | ISCRSSQSLLHSNGFNYVDWYLQKPGQSPHLLIYF |
| | | | | GSYRASGVPDRFSGSGSGTDFTLKISRVEAEDVGV |
| | | | | YYCMQALQTPPWTFGQGTKVEIRR |
| 89 | DVD828H | AB005VH | AB064VH | EVQLVQSGGGLVKPGGSLRLSCAASGFTFSSYAMH |
| | | | | WVRQAPGKGLEWVAVISYDGSNKYYADSVKGRFTI |
| | | | | SRDNSKNTLYLQMNSLRAEDTAVYYCARFSGWPNN |
| | | | | YYYYGMDVWGQGTTVTVSSASTKGPQVQLQESGPG |
| | | | | LVKPSQTLSLTCTVSGYSISSDFAWNWIRQPPGKG |
| | | | | LEWMGYISYSGNTRYQPSLKSRITISRDTSKNQFF |
| | | | | LKLNSVTAADTATYYCVTAGRGFPYWGQGTLVTVS |
| | | | | S |
| 90 | DVD828L | AB005VL | AB064VL | DVVMTQSPLSLPVTPGEPASISCRSSQSLLHSNGF |
| | | | | NYVDWYLQKPGQSPHLLIYFGSYRASGVPDRFSGS |
| | | | | GSGTDFTLKISRVEAEDVGVYYCMQALQTPPWTFG |
| | | | | QGTKVEIRRTVAAPSVFIFPPDIQMTQSPSSMSVS |
| | | | | VGDRVTITCHSSQDINSNIGWLQQKPGKSFKGLIY |
| | | | | HGTNLDDGVPSRFSGSGSGTDYTLTISSLQPEDFA |
| | | | | TYYCVQYAQFPWTFGGGTKLEIKR |

### Example 2.9

### Generation of EGFR (seq. 2) and ErbB3 (seq. 1) DVD-Igs with Linker Set 1

TABLE 20

| | DVD | Outer | Inner | |
|---|---|---|---|---|
| SEQ | Variable | Variable | Variable | |
| ID | Domain | Domain | Domain | Sequence |
| NO | Name | Name | Name | 12345678901234567890123456789012345 |
| 91 | DVD327H | AB064VH | AB062VH | QVQLQESGPGLVKPSQTLSLTCTVSGYSISSDFAW |
| | | | | NWIRQPPGKGLEWMGYISYSGNTRYQPSLKSRITI |
| | | | | SRDTSKNQFFLKLNSVTAADTATYYCVTAGRGFPY |
| | | | | WGQGTLVTVSSASTKGPQVQLQQWGAGLLKPSETL |
| | | | | SLTCAVYGGSFSGYYWSWIRQPPGKGLEWIGEINH |
| | | | | SGSTNYNPSLKSRVTISVETSKNQFSLKLSSVTAA |
| | | | | DTAVYYCARDKWTWYFDLWGRGTLVTVSS |
| 92 | DVD327L | AB064VL | AB062VL | DIQMTQSPSSMSVSVGDRVTITCHSSQDINSNIGW |
| | | | | LQQKPGKSFKGLIYHGTNLDDGVPSRFSGSGSGTD |
| | | | | YTLTISSLQPEDFATYYCVQYAQFPWTFGGGTKLE |
| | | | | IKRTVAAPDIEMTQSPDSLAVSLGERATINCRSSQ |
| | | | | SVLYSSSNRNYLAWYQQNPGQPPKLLIYWASTRES |
| | | | | GVPDRFSGSGSGTDFTLTISSLQAEDVAVYYCQQY |
| | | | | YSTPRTFGQGTKVEIKR |
| 93 | DVD328H | AB062VH | AB064VH | QVQLQQWGAGLLKPSETLSLTCAVYGGSFSGYYWS |
| | | | | WIRQPPGKGLEWIGEINHSGSTNYNPSLKSRVTIS |
| | | | | VETSKNQFSLKLSSVTAADTAVYYCARDKWTWYFD |
| | | | | LWGRGTLVTVSSASTKGPQVQLQESGPGLVKPSQT |
| | | | | LSLTCTVSGYSISSDFAWNWIRQPPGKGLEWMGYI |
| | | | | SYSGNTRYQPSLKSRITISRDASKNQFFLKLNSVT |
| | | | | AADTATYYCVTAGRGFPYWGQGTLVTVSS |
| 94 | DVD328L | AB062VL | AB064VL | DIEMTQSPDSLAVSLGERATINCRSSQSVLYSSSN |
| | | | | RNYLAWYQQNPGQPPKLLIYWASTRESGVPDRFSG |
| | | | | SGSGTDFTLTISSLQAEDVAVYYCQQYYSTPRTFG |
| | | | | QGTKVEIKRTVAAPDIQMTQSPSSMSVSVGDRVTI |
| | | | | TCHSSQDINSNIGWLQQKPGKSFKGLIYHGTNLDD |
| | | | | GVPSRFSGSGSGTDYTLTISSLQPEDFATYYCVQY |
| | | | | AQFPWTFGGGTKLEIKR |

### Example 2.10

### Generation of EGFR (seq. 2) and ErbB3 (seq. 1) DVD-Igs with Linker Set 2

TABLE 21

| | DVD | Outer | Inner | |
|---|---|---|---|---|
| SEQ | Variable | Variable | Variable | |
| ID | Domain | Domain | Domain | Sequence |
| NO | Name | Name | Name | 12345678901234567890123456789012345 |
| 95 | DVD769H | AB064VH | AB062VH | QVQLQESGPGLVKPSQTLSLTCTVSGYSISSDFAW |
| | | | | NWIRQPPGKGLEWMGYISYSGNTRYQPSLKSRITI |
| | | | | SRDASKNQFFLKLNSVTAADTATYYCVTAGRGFPY |
| | | | | WGQGTLVTVSSASTKGPSVFPLAPQVQLQQWGAGL |
| | | | | LKPSETLSLTCAVYGGSFSGYYWSWIRQPPGKGLE |
| | | | | WIGEINHSGSTNYNPSLKSRVTISVETSKNQFSLK |
| | | | | LSSVTAADTAVYYCARDKWTWYFDLWGRGTLVTVS |
| | | | | S |
| 96 | DVD768L | AB064VL | AB062VL | DIQMTQSPSSMSVSVGDRVTITCHSSQDINSNIGW |
| | | | | LQQKPGKSFKGLIYHGTNLDDGVPSRFSGSGSGTD |
| | | | | YTLTISSLQPEDFATYYCVQYAQFPWTFGGGTKLE |
| | | | | IKRTVAAPSVFIFPPDIEMTQSPDSLAVSLGERAT |
| | | | | INCRSSQSVLYSSSNRNYLAWYQQNPGQPPKLLIY |
| | | | | WASTRESGVPDRFSGSGSGTDFTLTISSLQAEDVA |
| | | | | VYYCQQYYSTPRTFGQGTKVEIKR |
| 97 | DVD770H | AB062VH | AB064VH | QVQLQQWGAGLLKPSETLSLTCAVYGGSFSGYYWS |
| | | | | WIRQPPGKGLEWIGEINHSGSTNYNPSLKSRVTIS |
| | | | | VETSKNQFSLKLSSVTAADTAVYYCARDKWTWYFD |
| | | | | LWGRGTLVTVSSASTKGPSVFPLAPQVQLQESGPG |
| | | | | LVKPSQTLSLTCTVSGYSISSDFAWNWIRQPPGKG |
| | | | | LEWMGYISYSGNTRYQPSLKSRITISRDTSKNQFF |
| | | | | LKLNSVTAADTATYYCVTAGRGFPYWGQGTLVTVS |
| | | | | S |
| 98 | DVD770L | AB062VL | AB064VL | DIEMTQSPDSLAVSLGERATINCRSSQSVLYSSSN |
| | | | | RNYLAWYQQNPGQPPKLLIYWASTRESGVPDRFSG |
| | | | | SGSGTDFTLTISSLQAEDVAVYYCQQYYSTPRTFG |
| | | | | QGTKVEIKRTVAAPSVFIFPPDIQMTQSPSSMSVS |
| | | | | VGDRVTITCHSSQDINSNIGWLQQKPGKSFKGLIY |
| | | | | HGTNLDDGVPSRFSGSGSGTDYTLTISSLQPEDFA |
| | | | | TYYCVQYAQFPWTFGGGTKLEIKR |

### Example 2.11

### Generation of EGFR (seq. 2) and ErbB3 (seq. 1) DVD-Igs with Linker Set 3

TABLE 22

| | DVD | Outer | Inner | |
|---|---|---|---|---|
| SEQ | Variable | Variable | Variable | |
| ID | Domain | Domain | Domain | Sequence |
| NO | Name | Name | Name | 12345678901234567890123456789012345 |
| 99 | DVD799H | AB064VH | AB062VH | QVQLQESGPGLVKPSQTLSLTCTVSGYSISSDFAW |
| | | | | NWIRQPPGKGLEWMGYISYSGNTRYQPSLKSRITI |
| | | | | SRDTSKNQFFLKLNSVTAADTATYYCVTAGRGFPY |
| | | | | WGQGTLVTVSSASTKGPSVFPLAPQVQLQQWGAGL |
| | | | | LKPSETLSLTCAVYGGSFSGYYWSWIRQPPGKGLE |
| | | | | WIGEINHSGSTNYNPSLKSRVTISVETSKNQFSLK |
| | | | | LSSVTAADTAVYYCARDKWTWYFDLWGRGTLVTVS |
| | | | | S |
| 100 | DVD799L | AB064VL | AB062VL | DIQMTQSPSSMSVSVGDRVTITCHSSQDINSNIGW |
| | | | | LQQKPGKSFKGLIYHGTNLDDGVPSRFSGSGSGTD |
| | | | | YTLTISSLQPEDFATYYCVQYAQFPWTFGGGTKLE |
| | | | | IKRTVAAPDTEMTQSPDSLAVSLGERATINCRSSQ |
| | | | | SVLYSSSNRNYLAWYQQNPGQPPKLLIYWASTRES |
| | | | | GVPDRFSGSGSGTDFTLTISSLQAEDVAVYYCQQY |
| | | | | YSTPRTFGQGTKVEIKR |
| 101 | DVD800H | AB062VH | AB064VH | QVQLQQWGAGLLKPSETLSLTCAVYGGSFSGYYWS |
| | | | | WIRQPPGKGLEWIGEINHSGSTNYNPSLKSRVTIS |
| | | | | VETSKNQFSLKLSSVTAADTAVYYCARDKWTWYFD |
| | | | | LWGRGTLVTVSSASTKGPSVFPLAPQVQLQESGPG |
| | | | | LVKPSQTLSLTCTVSGYSISSDFAWNWIRQPPGKG |
| | | | | LEWMGYISYSGNTRYQPSLKSRITISRDTSKNQFF |
| | | | | LKLNSVTAADTATYYCVTAGRGFPYWGQGTLVTVS |
| | | | | S |
| 102 | DVD800L | AB062VL | AB064VL | DIEMTQSPDSLAVSLGERATINCRSSQSVLYSSSN |
| | | | | RNYLAWYQQNPGQPPKLLIYWASTRESGVPDRFSG |
| | | | | SGSGTDFTLTISSLQAEDVAVYYCQQYYSTPRTFG |
| | | | | QGTKVEIKRTVAAPDIQMTQSPSSMSVSVGDRVTI |
| | | | | TCHSSQDINSNIGWLQQKPGKSFKGLIYHGTNLDD |
| | | | | GVPSRFSGSGSGTDYTLTISSLQPEDFATYYCVQY |
| | | | | AQFPWTFGGGTKLEIKR |

### Example 2.12

### Generation of EGFR (seq. 2) and ErbB3 (seq. 1) DVD-Igs with Linker Set 4

TABLE 23

| | DVD | Outer | Inner | |
|---|---|---|---|---|
| SEQ | Variable | Variable | Variable | |
| ID | Domain | Domain | Domain | Sequence |
| NO | Name | Name | Name | 12345678901234567890123456789012345 |
| 103 | DVD829H | AB064VH | AB062VH | QVQLQESGPGLVKPSQTLSLTCTVSGYSISSDFAW |
| | | | | NWIRQPPGKGLEWMGYISYSGNTRYQPSLKSRITI |
| | | | | SRDTSKNQFFLKLNSVTAADTATYYCVTAGRGFPY |
| | | | | WGQGTLVTVSSASTKGPQVQLQQWGAGLLKPSETL |
| | | | | SLTCAVYGGSFSGYYWSWIRQPPGKGLEWIGEINH |
| | | | | SGSTNYNPSLKSRVTISVETSKNQFSLKLSSVTAA |
| | | | | DTAVYYCARDKWTWYFDLWGRGTLVTVSS |
| 104 | DVD829L | AB064VL | AB062VL | DIQMTQSPSSMSVSVGDRVTITCHSSQDINSNIGW |
| | | | | LQQKPGKSFKGLIYHGTNLDDGVPSRFSGSGSGTD |
| | | | | YTLTISSLQPEDFATYYCVQYAQFPWTFGGGTKLE |
| | | | | IKRTVAAPSVFIFPPDIEMTQSPDSLAVSLGERAT |
| | | | | INCRSSQSVLYSSSNRNYLAWYQQNPGQPPKLLIY |
| | | | | WASTRESGVPDRFSGSGSGTDFTLTISSLQAEDVA |
| | | | | VYYCQQYYSTPRTFGQGTKVEIKR |
| 105 | DVD830H | AB062VH | AB064VH | QVQLQQWGAGLLKPSETLSLTCAVYGGSFSGYYWS |
| | | | | WIRQPPGKGLEWIGEINHSGSTNYNPSLKSRVTIS |
| | | | | VETSKNQFSLKLSSVTAADTAVYYCARDKWTWYFD |
| | | | | LWGRGTLVTVSSASTKGPQVQLQESGPGLVKPSQT |
| | | | | LSLTCTVSGYSISSDFAWNWIRQPPGKGLEWMGYI |
| | | | | SYSGNTRYQPSLKSRITISRDTSKNQFFLKLNSVT |
| | | | | AADTATYYCVTAGRGFPYWGQGTLVAVSS |
| 106 | DVD830L | AB062VL | AB064VL | DIEMTQSPDSLAVSLGERATINCRSSQSVLYSSSN |
| | | | | RNYLAWYQQNPGQPPKLLIYWASTRESGVPDRFSG |
| | | | | SGSGTDFTLTISSLQAEDVAVYYCQQYYSTPRTFG |
| | | | | QGTKVEIKRTVAAPSVFIFPPDIQMTQSPSSMSVS |
| | | | | VGDRVTITCHSSQDINSNIGWLQQKPGKSFKGLIY |
| | | | | HGTNLDDGVPSRFSGSGSGTDYTLTISSLQPEDFA |
| | | | | TYYCVQYAQFPWTFGGGTKLEIKR |

### Example 2.13

### Generation of EGFR (seq. 2) and ErbB3 (seq. 2) DVD-IgS with Linker Set 1

TABLE 24

| | DVD | Outer | Inner | |
|---|---|---|---|---|
| SEQ | Variable | Variable | Variable | |
| ID | Domain | Domain | Domain | Sequence |
| NO | Name | Name | Name | 12345678901234567890123456789012345 |
| 107 | DVD329H | AB064VH | AB063VH | QVQLQESGPGLVKPSQTLSLTCTVSGYSISSDFAW |
| | | | | NWIRQPPGKGLEWMGYISYSGNTRYQPSLKSRITI |
| | | | | SRDTSKNQFFLKLNSVTAADTATYYCVTAGRGFPY |
| | | | | WGQGTLVTVSSASTKGPEVQLVESGGGLVQPGGSL |
| | | | | RLSCAASGFTFSIYSMNWVRQAPGKGLEWVSYISS |
| | | | | SSSTIYYADSVKGRFTISRDNAKNSLYLQMNSLRD |
| | | | | EDTAVYYCARDRGDFDAFDIWGQGTMVTVSS |
| 108 | DVD329L | AB064VL | AB063VL | DIQMTQSPSSMSVSVGDRVTITCHSSQDINSNIGW |
| | | | | LQQKPGKSFKGLIYHGTNLDDGVPSRFSGSGSGTD |
| | | | | YTLTISSLQPEDFATYYCVQYAQFPWTFGGGTKLE |
| | | | | IKRTVAAPDIQMTQSPSSLSASVGDRVTITCQASQ |
| | | | | DITNYLNWYQQKPGKAPKLLIYDASNLETGVPSRF |
| | | | | SGSGSGTDFTFTISSLQPEDIATYNCQQCENFPIT |
| | | | | FGQGTRLEIKR |
| 109 | DVD330H | AB063VH | AB064VH | EVQLVESGGGLVQPGGSLRLSCAASGFTFSIYSMN |
| | | | | WVRQAPGKGLEWVSYISSSSSTIYYADSVKGRFTI |
| | | | | SRDNAKNSLYLQMNSLRDEDTAVYYCARDRGDFDA |
| | | | | FDIWGQGTMVTVSSASTKGPQVQLQESGPGLVKPS |
| | | | | QTLSLTCTVSGYSISSDFAWNWIRQPPGKGLEWMG |
| | | | | YISYSGNTRYQPSLKSRITISRDTSKNQFFLKLNS |
| | | | | VTAADTATYYCVTAGRGFPYWGQGTLVTVSS |
| 110 | DVD330L | AB063VL | AB064VL | DIQMTQSPSSLSASVGDRVTITCQASQDITNYLNW |
| | | | | YQQKPGKAPKLLIYDASNLETGVPSRFSGSGSGTD |
| | | | | FTFTISSLQPEDIATYNCQQCENFPITFGQGTRLE |
| | | | | IKRTVAAPDIQMTQSPSSMSVSVGDRVTITCHSSQ |
| | | | | DINSNIGWLQQKPGKSFKGLIYHGTNLDDGVPSRF |
| | | | | SGSGSGTDYTLTISSLQPEDFATYYCVQYAQFPWT |
| | | | | FGGGTKLEIKR |

### Example 2.14

### Generation of EGFR (seq. 2) and ErbB3 (seq. 2) DVD-Igs with Linker Set 2

TABLE 25

| | DVD | Outer | Inner | |
|---|---|---|---|---|
| SEQ | Variable | Variable | Variable | |
| ID | Domain | Domain | Domain | Sequence |
| NO | Name | Name | Name | 12345678901234567890123456789012345 |
| 111 | DVD771H | AB064VH | AB063VH | QVQLQESGPGLVKPSQTLSLTCTVSGYSISSDFAW |
| | | | | NWIRQPPGKGLEWMGYISYSGNTRYQPSLKSRITI |
| | | | | SRDTSKNQFFLKLNSVTAADTATYYCVTAGRGFPY |
| | | | | WGQGTLVTVSSASTKGPSVFPLAPEVQLVESGGGL |
| | | | | VQPGGSLRLSCAASGFTFSIYSMNWVRQAPGKGLE |
| | | | | WVSYISSSSSTIYYADSVKGRFTISRDNAKNSLYL |
| | | | | QMNSLRDEDTAVYYCARDRGDFDAFDIWGQGTMVT |
| | | | | VSS |
| 112 | DVD771L | AB064VL | AB063VL | DIQMTQSPSSMSVSVGDRVTITCHSSQDINSNIGW |
| | | | | LQQKPGKSFKGLIYHGTNLDDGVPSRFSGSGSGTD |
| | | | | YTLTISSLQPEDFATYYCVQYAQFPWTFGGGTKLE |
| | | | | IKRTVAAPSVFIFPPDIQMTQSPSSLSASVGDRVT |
| | | | | ITCQASQDITNYLNWYQQKPGKAPKLLIYDASNLE |
| | | | | IGVPSRFSGSGSGTDFTFTISSLQPEDIATYNCQQ |
| | | | | CENFPITFGQGTRLEIKR |
| 113 | DVD772H | AB063VH | AB064VH | EVQLVESGGGLVQPGGSLRLSCAASGFTFSIYSMN |
| | | | | WVRQAPGKGLEWVSYISSSSSTIYYADSVKGRFTI |
| | | | | SRDNAKNSLYLQMNSLRDEDTAVYYCARDRGDFDA |
| | | | | FDIWGQGTMVTVSSASTKGPSVFPLAPQVQLQESG |
| | | | | PGLVKPSQTLSLTCTVSGYSISSDFAWNWIRQPPG |
| | | | | KGLEWMGYISYSGNTRYQPSLKSRITISRDTSKNQ |
| | | | | FFLKLNSVTAADTATYYCVTAGRGFPYWGQGTLVT |
| | | | | VSS |
| 114 | DVD772L | AB063VL | AB064VL | DIQMTQSPSSLSASVGDRVTITCQASQDITNYLNW |
| | | | | YQQKPGKAPKLLIYDASNLETGVPSRFSGSGSGTD |
| | | | | FTFTISSLQPEDIATYNCQQCENFPITFGQGTRLE |
| | | | | IKRTVAAPSVFIFPPDIQMTQSPSSMSVSVGDRVT |
| | | | | ITCHSSQDINSNIGWLQQKPGKSFKGLIYHGTNLD |
| | | | | DGVPSRFSGSGSGTDYTLTISSLQPEDFATYYCVQ |
| | | | | YAQFPWTFGGGTKLEIKR |

### Example 2.15

### Generation of EGFR (seq. 2) and ErbB3 (seq. 2) DVD-Igs with Linker Set 3

TABLE 26

| | DVD | Outer | Inner | |
|---|---|---|---|---|
| SEQ | Variable | Variable | Variable | |
| ID | Domain | Domain | Domain | Sequence |
| NO | Name | Name | Name | 12345678901234567890123456789012345 |
| 115 | DVD801H | AB064VH | AB063VH | QVQLQESGPGLVKPSQTLSLTCTVSGYSISSDFAW |
| | | | | NWIRQPPGKGLEWMGYISYSGNTRYQPSLKSRITI |
| | | | | SRDTSKNQFFLKLNSVTAADTATYYCVTAGRGFPY |
| | | | | WGQGTLVTVSSASTKGPSVFPLAPEVQLVESGGGL |
| | | | | VQPGGSLRLSCAASGFTFSIYSMNWVRQAPGKGLE |
| | | | | WVSYISSSSSTIYYADSVKGRFTISRDNAKNSLYL |
| | | | | QMNSLRDEDTAVYYCARDRGDFDAFDIWGQGTMVT |
| | | | | VSS |
| 116 | DVD801L | AB064VL | AB063VL | DIQMTQSPSSMSVSVGDRVTITCHSSQDINSNIGW |
| | | | | LQQKPGKSFKGLIYHGTNLDDGVPSRFSGSGSGTD |
| | | | | YTLTISSLQPEDFATYYCVQYAQFPWTFGGGTKLE |
| | | | | IKRTVAAPDIQMTQSPSSLSASVGDRVTITCQASQ |
| | | | | DITNYLNWYQQKPGKAPKLLIYDASNLETGVPSRF |
| | | | | SGSGSGTDFTFTISSLQPEDIATYNCQQCENFPIT |
| | | | | FGQGTRLEIKR |
| 117 | DVD802H | AB063VH | AB064VH | EVQLVESGGGLVQPGGSLRLSCAASGFTFSIYSMN |
| | | | | WVRQAPGKGLEWVSYISSSSSTIYYADSVKGRFTI |
| | | | | SRDNAKNSLYLQMNSLRDEDTAVYYCARDRGDFDA |
| | | | | FDIWGQGTMVTVSSASTKGPSVFPLAPQVQLQESG |
| | | | | PGLVKPSQTLSLTCTVSGYSISSDFAWNWIRQPPG |
| | | | | KGLEWMGYISYSGNTRYQPSLKSRITISRDTSKNQ |
| | | | | FFLKLNSVTAADTATYYCVTAGRGFPYWGQGTLVT |
| | | | | VSS |
| 118 | DVD802L | AB063VL | AB064VL | DIQMTQSPSSLSASVGDRVTITCQASQDITNYLNW |
| | | | | YQQKPGKAPKLLIYDASNLETGVPSRFSGSGSGTD |
| | | | | FTFTISSLQPEDIATYNCQQCENFPITFGQGTRLE |
| | | | | IKRTVAAPDIQMTQSPSSMSVSVGDRVTITCHSSQ |
| | | | | DINSNIGWLQQKPGKSFKGLIYHGTNLDDGVPSRF |
| | | | | SGSGSGTDYTLTISSLQPEDFATYYCVQYAQFPWT |
| | | | | FGGGTKLEIKR |

### Example 2.16

### Generation of EGFR (seq. 2) and ErbB3 (seq. 2) DVD-Igs with Linker Set 4

TABLE 27

| | DVD | Outer | Inner | |
|---|---|---|---|---|
| SEQ | Variable | Variable | Variable | |
| ID | Domain | Domain | Domain | Sequence |
| NO | Name | Name | Name | 12345678901234567890123456789012345 |
| 119 | DVD831H | AB064VH | AB063VH | QVQLQESGPGLVKPSQTLSLTCTVSGYSISSDFAW |
| | | | | NWIRQPPGKGLEWMGYISYSGNTRYQPSLKSRITI |
| | | | | SRDTSKNQFFLKLNSVTAADTATYYCVTAGRGFPY |
| | | | | WGQGTLVTVSSASTKGPEVQLVESGGGLVQPGGSL |
| | | | | RLSCAASGFTFSIYSMNWVRQAPGKGLEWVSYISS |
| | | | | SSSTIYYADSVKGRFTISRDNAKNSLYLQMNSLRD |
| | | | | EDTAVYYCARDRGDFDAFDIWGQGTMVTVSS |
| 120 | DVD831L | AB064VL | AB063VL | DIQMTQSPSSMSVSVGDRVTITCHSSQDINSNIGW |
| | | | | LQQKPGKSFKGLIYHGTNLDDGVPSRFSGSGSGTD |
| | | | | YTLTISSLQPEDFATYYCVQYAQFPWTFGGGTKLE |
| | | | | IKRTVAAPSVFIFPPDIQMTQSPSSLSASVGDRVT |
| | | | | ITCQASQDITNYLNWYQQKPGKAPKLLIYDASNLE |
| | | | | TGVPSRFSGSGSGTDFTFTISSLQPEDIATYNCQQ |
| | | | | CENFPITFGQGTRLEIKR |
| 121 | DVD832H | AB063VH | AB064VH | EVQLVESGGGLVQPGGSLRLSCAASGFTFSIYSMN |
| | | | | WVRQAPGKGLEWVSYISSSSSTIYYADSVKGRFTI |
| | | | | SRDNAKNSLYLQMNSLRDEDTAVYYCARDRGDFDA |
| | | | | FDIWGQGTMVTVSSASTKGPQVQLQESGPGLVKPS |
| | | | | QTLSLTCTVSGYSISSDFAWNWIRQPPGKGLEWMG |
| | | | | YISYSGNTRYQPSLKSRITISRDTSKNQFFLKLNS |
| | | | | VTAADTATYYCVTAGRGFPYWGQGTLVTVSS |
| 122 | DVD832L | AB063VL | AB064VL | DIQMTQSPSSLSASVGDRVTITCQASQDITNYLNW |
| | | | | YQQKPGKAPKLLIYDASNLETGVPSRFSGSGSGTD |
| | | | | FTFTISSLQPEDIATYNCQQCENFPITFGQGTRLE |
| | | | | IKRTVAAPSVFIFPPDIQMTQSPSSMSVSVGDRVT |
| | | | | ITCHSSQDINSNIGWLQQKPGKSFKGLIYHGTNLD |
| | | | | DGVPSRFSGSGSGTDYTLTISSLQPEDFATYYCVQ |
| | | | | YAQFPWTFGGGTKLEIKR |

### Example 2.17

### Generation of EGFR (seq. 2) and CD3 DVD-IgS with Linker Set 1

TABLE 28

| | DVD | Outer | Inner | |
|---|---|---|---|---|
| SEQ | Variable | Variable | Variable | |
| ID | Domain | Domain | Domain | Sequence |
| NO | Name | Name | Name | 12345678901234567890123456789012345 |
| 123 | DVD331H | AB064VH | AB002VH | QVQLQESGPGLVKPSQTLSLTCTVSGYSISSDFAW |
| | | | | NWIRQPPGKGLEWMGYISYSGNTRYQPSLKSRITI |
| | | | | SRDTSKNQFFLKLNSVTAADTATYYCVTAGRGFPY |
| | | | | WGQGTLVTVSSASTKGPQVQLQQSGAELARPGASV |
| | | | | KMSCKASGYTFTRYTMHWVKQRPGQGLEWIGYINP |
| | | | | SRGYTNYNQKFKDKATLTTDKSSSTAYMQLSSLTS |
| | | | | EDSAVYYCARYYDDHYCLDYWGQGTTLTVSS |
| 124 | DVD331L | AB064VL | AB002VL | DIQMTQSPSSMSVSVGDRVTITCHSSQDINSNIGW |
| | | | | LQQKPGKSFKGLIYHGTNLDDGVPSRFSGSGSGTD |
| | | | | YTLTISSLQPEDFATYYCVQYAQFPWTFGGGTKLE |
| | | | | IKRTVAAPQIVLTQSPAIMSASPGEKVTMTCRASS |
| | | | | SVSYMNWYQQKSGTSPKRWIYDTSKVASGVPYRFS |
| | | | | GSGSGTSYSLTISSMEAEDAATYYCQQWSSNPLTF |
| | | | | GSGTKLEINR |
| 125 | DVD332H | AB002VH | AB064VH | QVQLQQSGAELARPGASVKMSCKASGYTFTRYTMH |
| | | | | WVKQRPGQGLEWIGYINPSRGYTNYNQKFKDKATL |
| | | | | TTDKSSSTAYMQLSSLTSEDSAVYYCARYYDDHYC |
| | | | | LDYWGQGTTLTVSSASTKGPQVQLQESGPGLVKPS |
| | | | | QTLSLTCTVSGYSISSDFAWNWIRQPPGKGLEWMG |
| | | | | YISYSGNTRYQPSLKSRITISRDISKNQFFLKLNS |
| | | | | VTAADTATYYCVTAGRGFPYWGQGTLVTVSS |
| 126 | DVD332L | AB002VL | AB064VL | QIVLTQSPAIMSASPGEKVTMTCRASSSVSYMNWY |
| | | | | QQKSGTSPKRWIYDTSKVASGVPYRFSGSGSGTSY |
| | | | | SLTISSMEAEDAATYYCQQWSSNPLTFGSGTKLEI |
| | | | | NRTVAAPDIQMTQSPSSMSVSVGDRVTITCHSSQD |
| | | | | INSNIGWLQQKPGKSFKGLIYHGTNLDDGVPSRFS |
| | | | | GSGSGTDYTLTISSLQPEDFATYYCVQYAQFPWTF |
| | | | | GGGTKLEIKR |

### Example 2.18

### Generation of EGFR (seq. 2) and CD3 DVD-IgS with Linker Set 2

TABLE 29

| | DVD | Outer | Inner | |
|---|---|---|---|---|
| SEQ | Variable | Variable | Variable | |
| ID | Domain | Domain | Domain | Sequence |
| NO | Name | Name | Name | 12345678901234567890123456789012345 |
| 127 | DVD773H | AB064VH | AB002VH | QVQLQESGPGLVKPSQTLSLTCTVSGYSISSDFAW |
| | | | | NWIRQPPGKGLEWMGYISYSGNTRYQPSLKSRITI |
| | | | | SRDASKNQFFLKLNSVTAADTATYYCVTAGRGFPY |
| | | | | WGQGTLVTVSSASTKGPSVFPLAPQVQLQQSGAEL |
| | | | | ARPGASVKMSCKASGYTFTRYTMHWVKQRPGQGLE |
| | | | | WIGYINPSRGYTNYNQKFKDKATLTTDKSSSTAYM |
| | | | | QLSSLTSEDSAVYYCARYYDDHYCLDYWGQGTTLT |
| | | | | VSS |
| 128 | DVD773L | AB064VL | AB002VL | DIQMTQSPSSMSVSVGDRVTITCHSSQDINSNIGW |
| | | | | LQQKPGKSFKGLIYHGTNLDDGVPSRFSGSGSGTD |
| | | | | YTLTISSLQPEDFATYYCVQYAQFPWTFGGGTKLE |
| | | | | IKRTVAAPSVFIFPPQIVLTQSPAIMSASPGEKVT |
| | | | | MTCRASSSVSYMNWYQQKSGTSPKRWIYDTSKVAS |
| | | | | GVPYRFSGSGSGTSYSLTISSMEAEDAATYYCQQW |
| | | | | SSNPLTFGSGTKLEINR |
| 129 | DVD774H | AB002VH | AB064VH | QVQLQQSGAELARPGASVKMSCKASGYTFTRYTMH |
| | | | | WVKQRPGQGLEWIGYINPSRGYTNYNQKFKDKATL |
| | | | | TTDKSSSTAYMQLSSLTSEDSAVYYCARYYDDHYC |
| | | | | LDYWGQGTTLTVSSASTKGPSVFPLAPQVQLQESG |
| | | | | PGLVKPSQTLSLTCTVSGYSISSDFAWNWIRQPPG |
| | | | | KGLEWMGYISYSGNTRYQPSLKSRITISRDTSKNQ |
| | | | | FFLKLNSVTAADTATYYCVTAGRGFPYWGQGTLVT |
| | | | | VSS |
| 130 | DVD774L | AB002VL | AB064VL | QIVLTQSPAIMSASPGEKVTMTCRASSSVSYMNWY |
| | | | | QQKSGTSPKRWIYDTSKVASGVPYRFSGSGSGTSY |
| | | | | SLTISSMEAEDAATYYCQQWSSNPLTFGSGTKLEI |
| | | | | NRTVAAPSVFIFPPDIQMTQSPSSMSVSVGDRVTI |
| | | | | TCHSSQDINSNIGWLQQKPGKSFKGLIYHGTNLDD |
| | | | | GVPSRFSGSGSGTDYTLTISSLQPEDFATYYCVQY |
| | | | | AQFPWTFGGGTKLEIKR |

### Example 2.19

### Generation of EGFR (seq. 2) and CD3 DVD-Igs with Linker Set 3

TABLE 30

| | DVD | Outer | Inner | |
|---|---|---|---|---|
| SEQ | Variable | Variable | Variable | |
| ID | Domain | Domain | Domain | Sequence |
| NO | Name | Name | Name | 12345678901234567890123456789012345 |
| 131 | DVD803H | AB064VH | AB002VH | QVQLQESGPGLVKPSQTLSLTCTVSGYSISSDFAW |
| | | | | NWIRQPPGKGLEWMGYISYSGNTRYQPSLKSRITI |
| | | | | SRDTSKNQFFLKLNSVTAADTATYYCVTAGRGFPY |
| | | | | WGQGTLVTVSSASTKGPSVFPLAPQVQLQQSGAEL |
| | | | | ARPGASVKMSCKASGYTFTRYTMHWVKQRPGQGLE |
| | | | | WIGYINPSRGYTNYNQKFKDKATLTTDKSSSTAYM |
| | | | | QLSSLTSEDSAVYYCARYYDDHYCLDYWGQGTTLT |
| | | | | VSS |
| 132 | DVD803L | AB064VL | AB002VL | DIQMTQSPSSMSVSVGDRVTITCHSSQDINSNIGW |
| | | | | LQQKPGKSFKGLIYHGTNLDDGVPSRFSGSGSGTD |
| | | | | YTLTISSLQPEDFATYYCVQYAQFPWTFGGGTKLE |
| | | | | IKRTVAAPQIVLTQSPAIMSASPGEKVTMTCRASS |
| | | | | SVSYMNWYQQKSGTSPKRWIYDTSKVASGVPYRFS |
| | | | | GSGSGTSYSLTISSMEAEDAATYYCQQWSSNPLTF |
| | | | | GSGTKLEINR |
| 133 | DVD804H | AB002VH | AB064VH | QVQLQQSGAELARPGASVKMSCKASGYTFTRYTMH |
| | | | | WVKQRPGQGLEWIGYINPSRGYTNYNQKFKDKATL |
| | | | | TTDKSSSTAYMQLSSLTSEDSAVYYCARYYDDHYC |
| | | | | LDYWGQGTTLTVSSASTKGPSVFPLAPQVQLQESG |
| | | | | PGLVKPSQTLSLTCTVSGYSISSDFAWNWIRQPPG |
| | | | | KGLEWMGYISYSGNTRYQPSLKSRITISRDTSKNQ |
| | | | | FFLKLNSVTAADTATYYCVTAGRGFPYWGQGTLVT |
| | | | | VSS |
| 134 | DVD804L | AB002VL | AB064VL | QIVLTQSPAIMSASPGEKVTMTCRASSSVSYMNWY |
| | | | | QQKSGTSPKRWIYDTSKVASGVPYRFSGSGSGTSY |
| | | | | SLTISSMEAEDAATYYCQQWSSNPLTFGSGTKLEI |
| | | | | NRTVAAPDIQMTQSPSSMSVSVGDRVTITCHSSQD |
| | | | | INSNIGWLQQKPGKSFKGLIYHGTNLDDGVPSRFS |
| | | | | GSGSGTDYTLTISSLQPEDFATYYCVQYAQFPWTF |
| | | | | GGGTKLEIKR |

### Example 2.20

### Generation of EGFR (seq. 2) and CD3 DVD-IgS with Linker Set 4

TABLE 31

| | DVD | Outer | Inner | |
|---|---|---|---|---|
| SEQ | Variable | Variable | Variable | |
| ID | Domain | Domain | Domain | Sequence |
| NO | Name | Name | Name | 12345678901234567890123456789012345 |
| 135 | DVD833H | AB064VH | AB002VH | QVQLQESGPGLVKPSQTLSLTCTVSGYSISSDFAW |
| | | | | NWIRQPPGKGLEWMGYISYSGNTRYQPSLKSRITI |
| | | | | SRDTSKNQFFLKLNSVTAADTATYYCVTAGRGFPY |
| | | | | WGQGTLVTVSSASTKGPQVQLQQSGAELARPGASV |
| | | | | KMSCKASGYTFTRYTMHWVKQRPGQGLEWIGYINP |
| | | | | SRGYTNYNQKFKDKATLTTDKSSSTAYMQLSSLTS |
| | | | | EDSAVYYCARYYDDHYCLDYWGQGTTLTVSS |
| 136 | DVD833L | AB064VL | AB002VL | DIQMTQSPSSMSVSVGDRVTITCHSSQDINSNIGW |
| | | | | LQQKPGKSFKGLIYHGTNLDDGVPSRFSGSGSGTD |
| | | | | YTLTISSLQPEDFATYYCVQYAQFPWTFGGGTKLE |
| | | | | IKRTVAAPSVFIFPPQIVLTQSPAIMSASPGEKVT |
| | | | | MTCRASSSVSYMNWYQQKSGTSPKRWIYDTSKVAS |
| | | | | GVPYRFSGSGSGTSYSLTISSMEAEDAATYYCQQW |
| | | | | SSNPLTFGSGTKLEINR |
| 137 | DVD834H | AB002VH | AB064VH | QVQLQQSGAELARPGASVKMSCKASGYTFTRYTMH |
| | | | | WVKQRPGQGLEWIGYINPSRGYTNYNQKFKDKATL |
| | | | | TTDKSSSTAYMQLSSLTSEDSAVYYCARYYDDHYC |
| | | | | LDYWGQGTTLTVSSASTKGPQVQLQESGPGLVKPS |
| | | | | QTLSLTCTVSGYSISSDFAWNWIRQPPGKGLEWMG |
| | | | | YISYSGNTRYQPSLKSRITISRDTSKNQFFLKLNS |
| | | | | VTAADTATYYCVTAGRGFPYWGQGTLVTVSS |
| 138 | DVD834L | AB002VL | AB064VL | QIVLTQSPAIMSASPGEKVTMTCRASSSVSYMNWY |
| | | | | QQKSGTSPKRWIYDTSKVASGVPYRFSGSGSGTSY |
| | | | | SLTISSMEAEDAATYYCQQWSSNPLTFGSGTKLEI |
| | | | | NRTVAAPSVFIFPPDIQMTQSPSSMSVSVGDRVTI |
| | | | | TCHSSQDINSNIGWLQQKPGKSFKGLIYHGTNLDD |
| | | | | GVPSRFSGSGSGTDYTLTISSLQPEDFATYYCVQY |
| | | | | AQFPWTFGGGTKLEIKR |

### Example 2.21

### Generation of EGFR (seq. 2) and IGF1R DVD-IgS with Linker Set 1

TABLE 32

| | DVD | Outer | Inner | |
|---|---|---|---|---|
| SEQ | Variable | Variable | Variable | |
| ID | Domain | Domain | Domain | Sequence |
| NO | Name | Name | Name | 12345678901234567890123456789012345 |
| 139 | DVD333H | AB064VH | AB011VH | QVQLQESGPGLVKPSQTLSLTCTVSGYSISSDFAW |
| | | | | NWIRQPPGKGLEWMGYISYSGNTRYQPSLKSRITI |
| | | | | SRDTSKNQFFLKLNSVTAADTATYYCVTAGRGFPY |
| | | | | WGQGTLVTVSSASTKGPEVQLLESGGGLVQPGGSL |
| | | | | RLSCTASGFTFSSYAMNWVRQAPGKGLEWVSAISG |
| | | | | SGGTTFYADSVKGRFTISRDNSRTTLYLQMNSLRA |
| | | | | EDTAVYYCAKDLGWSDSYYYYYGMDVWGQGTTVTV |
| | | | | SS |
| 140 | DVD333L | AB064VL | AB011VL | DIQMTQSPSSMSVSVGDRVTITCHSSQDINSNIGW |
| | | | | LQQKPGKSFKGLIYHGTNLDDGVPSRFSGSGSGTD |
| | | | | YTLTISSLQPEDFATYYCVQYAQFPWTFGGGTKLE |
| | | | | IKRTVAAPDIQMTQFPSSLSASVGDRVTITCRASQ |
| | | | | GIRNDLGWYQQKPGKAPKRLIYAASRLHRGVPSRF |
| | | | | SGSGSGTEFTLTISSLQPEDFATYYCLQHNSYPCS |
| | | | | FGQGTKLEIKR |
| 141 | DVD334H | AB011VH | AB064VH | EVQLLESGGGLVQPGGSLRLSCTASGFTFSSYAMN |
| | | | | WVRQAPGKGLEWVSAISGSGGTTFYADSVKGRFTI |
| | | | | SRDNSRTTLYLQMNSLRAEDTAVYYCAKDLGWSDS |
| | | | | YYYYYGMDVWGQGTTVTVSSASTKGPQVQLQESGP |
| | | | | GLVKPSQTLSLTCTVSGYSISSDFAWNWIRQPPGK |
| | | | | GLEWMGYISYSGNTRYQPSLKSRITISRDTSKNQF |
| | | | | FLKLNSVTAADTATYYCVTAGRGFPYWGQGTLVTV |
| | | | | SS |
| 142 | DVD334L | AB011VL | AB064VL | DIQMTQFPSSLSASVGDRVTITCRASQGIRNDLGW |
| | | | | YQQKPGKAPKRLIYAASRLHRGVPSRFSGSGSGTE |
| | | | | FTLTISSLQPEDFATYYCLQHNSYPCSFGQGTKLE |
| | | | | IKRTVAAPDIQMTQSPSSMSVSVGDRVTITCHSSQ |
| | | | | DINSNIGWLQQKPGKSFKGLIYHGTNLDDGVPSRF |
| | | | | SGSGSGTDYTLTISSLQPEDFATYYCVQYAQFPWT |
| | | | | FGGGTKLEIKR |

### Example 2.22

### Generation of EGFR (seq. 2) and IGF1R DVD-IgS with Linker Set 2

TABLE 33

| | DVD | Outer | Inner | |
|---|---|---|---|---|
| SEQ | Variable | Variable | Variable | |
| ID | Domain | Domain | Domain | Sequence |
| NO | Name | Name | Name | 12345678901234567890123456789012345 |
| 143 | DVD775H | AB064VH | AB011VH | QVQLQESGPGLVKPSQTLSLTCTVSGYSISSDFAW |
| | | | | NWIRQPPGKGLEWMGYISYSGNTRYQPSLKSRITI |
| | | | | SRDTSKNQFFLKLNSVTAADTATYYCVTAGRGFPY |
| | | | | WGQGTLVTVSSASTKGPSVFPLAPEVQLLESGGGL |
| | | | | VQPGGSLRLSCTASGFTFSSYAMNWVRQAPGKGLE |
| | | | | WVSAISGSGGTTFYADSVKGRFTISRDNSRTTLYL |
| | | | | QMNSLRAEDTAVYYCAKDLGWSDSYYYYYGMDVWG |
| | | | | QGTTVTVSS |
| 144 | DVD775L | AB064VL | AB011VL | DIQMTQSPSSMSVSVGDRVTITCHSSQDINSNIGW |
| | | | | LQQKPGKSFKGLIYHGTNLDDGVPSRFSGSGSGTD |
| | | | | YTLTISSLQPEDFATYYCVQYAQFPWTFGGGTKLE |
| | | | | IKRTVAAPSVFIFPPDIQMTQFPSSLSASVGDRVT |
| | | | | ITCRASQGIRNDLGWYQQKPGKAPKRLIYAASRLH |
| | | | | RGVPSRFSGSGSGTEFTLTISSLQPEDFATYYCLQ |
| | | | | HNSYPCSFGQGTKLEIKR |
| 145 | DVD776H | AB011VH | AB064VH | EVQLLESGGGLVQPGGSLRLSCTASGFTFSSYAMN |
| | | | | WVRQAPGKGLEWVSAISGSGGTTFYADSVKGRFTI |
| | | | | SRDNSRTTLYLQMNSLRAEDTAVYYCAKDLGWSDS |
| | | | | YYYYYGMDVWGQGTTVTVSSASTKGPSVFPLAPQV |
| | | | | QLQESGPGLVKPSQTLSLTCTVSGYSISSDFAWNW |
| | | | | IRQPPGKGLEWMGYISYSGNTRYQPSLKSRITISR |
| | | | | DTSKNQFFLKLNSVTAADTATYYCVTAGRGFPYWG |
| | | | | QGTLVTVSS |
| 146 | DVD776L | AB011VL | AB064VL | DIQMTQFPSSLSASVGDRVTITCRASQGIRNDLGW |
| | | | | YQQKPGKAPKRLIYAASRLHRGVPSRFSGSGSGTE |
| | | | | FTLTISSLQPEDFATYYCLQHNSYPCSFGQGTKLE |
| | | | | IKRTVAAPSVFIFPPDIQMTQSPSSMSVSVGDRVT |
| | | | | ITCHSSQDINSNIGWLQQKPGKSFKGLIYHGTNLD |
| | | | | DGVPSRFSGSGSGTDYTLTISSLQPEDFATYYCVQ |
| | | | | YAQFPWTFGGGTKLEIKR |

### Example 2.23

### Generation of EGFR (seq. 2) and IGF1R DVD-Igs with Linker Set 3

TABLE 34

| | DVD | Outer | Inner | |
|---|---|---|---|---|
| SEQ | Variable | Variable | Variable | |
| ID | Domain | Domain | Domain | Sequence |
| NO | Name | Name | Name | 12345678901234567890123456789012345 |
| 147 | DVD805H | AB064VH | AB011VH | QVQLQESGPGLVKPSQTLSLTCTVSGYSISSDFAW |
| | | | | NWIRQPPGKGLEWMGYISYSGNTRYQPSLKSRITI |
| | | | | SRDTSKNQFFLKLNSVTAADTATYYCVTAGRGFPY |
| | | | | WGQGTLVTVSSASTKGPSVFPLAPEVQLLESGGGL |
| | | | | VQPGGSLRLSCTASGFTFSSYAMNWVRQAPGKGLE |
| | | | | WVSAISGSGGTTFYADSVKGRFTISRDNSRTTLYL |
| | | | | QMNSLRAEDTAVYYCAKDLGWSDSYYYYYGMDVWG |
| | | | | QGTTVTVSS |
| 148 | DVD805L | AB064VL | AB011VL | DIQMTQSPSSMSVSVGDRVTITCHSSQDINSNIGW |
| | | | | LQQKPGKSFKGLIYHGTNLDDGVPSRFSGSGSGTD |
| | | | | YTLTISSLQPEDFATYYCVQYAQFPWTFGGGTKLE |
| | | | | IKRTVAAPDIQMTQFPSSLSASVGDRVTITCRASQ |
| | | | | GIRNDLGWYQQKPGKAPKRLIYAASRLHRGVPSRF |
| | | | | SGSGSGTEFTLTISSLQPEDFATYYCLQHNSYPCS |
| | | | | FGQGTKLEIKR |
| 149 | DVD806H | AB011VH | AB064VH | EVQLLESGGGLVQPGGSLRLSCTASGFTFSSYAMN |
| | | | | WVRQAPGKGLEWVSAISGSGGTTFYADSVKGRFTI |
| | | | | SRDNSRTTLYLQMNSLRAEDTAVYYCAKDLGWSDS |
| | | | | YYYYYGMDVWGQGTTVTVSSASTKGPSVFPLAPQV |
| | | | | QLQESGPGLVKPSQTLSLTCTVSGYSISSDFAWNW |
| | | | | IRQPPGKGLEWMGYISYSGNTRYQPSLKSRITISR |
| | | | | DTSKNQFFLKLNSVTAADTATYYCVTAGRGFPYWG |
| | | | | QGTLVTVSS |
| 150 | DVD806L | AB011VL | AB064VL | DIQMTQFPSSLSASVGDRVTITCRASQGIRNDLGW |
| | | | | YQQKPGKAPKRLIYAASRLHRGVPSRFSGSGSGTE |
| | | | | FTLTISSLQPEDFATYYCLQHNSYPCSFGQGTKLE |
| | | | | IKRTVAAPDIQMTQSPSSMSVSVGDRVTITCHSSQ |
| | | | | DINSNIGWLQQKPGKSFKGLIYHGTNLDDGVPSRF |
| | | | | SGSGSGTDYTLTISSLQPEDFATYYCVQYAQFPWT |
| | | | | FGGGTKLEIKR |

### Example 2.24

### Generation of EGFR (seq. 2) and IGF1R DVD-IgS with Linker Set 4

TABLE 35

| | DVD | Outer | Inner | |
|---|---|---|---|---|
| SEQ | Variable | Variable | Variable | |
| ID | Domain | Domain | Domain | Sequence |
| NO | Name | Name | Name | 12345678901234567890123456789012345 |
| 151 | DVD835H | AB064VH | AB011VH | QVQLQESGPGLVKPSQTLSLTCTVSGYSISSDFAW |
| | | | | NWIRQPPGKGLEWMGYISYSGNTRYQPSLKSRITI |
| | | | | SRDTSKNQFFLKLNSVTAADTATYYCVTAGRGFPY |
| | | | | WGQGTLVTVSSASTKGPEVQLLESGGGLVQPGGSL |
| | | | | RLSCTASGFTFSSYAMNWVRQAPGKGLEWVSAISG |
| | | | | SGGTTFYADSVKGRFTISRDNSRTTLYLQMNSLRA |
| | | | | EDTAVYYCAKDLGWSDSYYYYYGMDVWGQGTTVTV |
| | | | | SS |
| 152 | DVD835L | AB064VL | AB011VL | DIQMTQSPSSMSVSVGDRVTITCHSSQDINSNIGW |
| | | | | LQQKPGKSFKGLIYHGTNLDDGVPSRFSGSGSGTD |
| | | | | YTLTISSLQPEDFATYYCVQYAQFPWTFGGGTKLE |
| | | | | IKRTVAAPSVFIFPPDIQMTQFPSSLSASVGDRVT |
| | | | | ITCRASQGIRNDLGWYQQKPGKAPKRLIYAASRLH |
| | | | | RGVPSRFSGSGSGTEFTLTISSLQPEDFATYYCLQ |
| | | | | HNSYPCSFGQGTKLEIKR |
| 153 | DVD836H | AB011VH | AB064VH | EVQLLESGGGLVQPGGSLRLSCTASGFTFSSYAMN |
| | | | | WVRQAPGKGLEWVSAISGSGGTTFYADSVKGRFTI |
| | | | | SRDNSRTTLYLQMNSLRAEDTAVYYCAKDLGWSDS |
| | | | | YYYYYGMDVWGQGTTVTVSSASTKGPQVQLQESGP |
| | | | | GLVKPSQTLSLTCTVSGYSISSDFAWNWIRQPPGK |
| | | | | GLEWMGYISYSGNTRYQPSLKSRITISRDTSKNQF |
| | | | | FLKLNSVTAADTATYYCVTAGRGFPYWGQGTLVTV |
| | | | | SS |
| 154 | DVD836L | AB011VL | AB064VL | DIQMTQFPSSLSASVGDRVTITCRASQGIRNDLGW |
| | | | | YQQKPGKAPKRLIYAASRLHRGVPSRFSGSGSGTE |
| | | | | FTLTISSLQPEDFATYYCLQHNSYPCSFGQGTKLE |
| | | | | IKRTVAAPSVFIFPPDIQMTQSPSSMSVSVGDRVT |
| | | | | ITCHSSQDINSNIGWLQQKPGKSFKGLIYHGTNLD |
| | | | | DGVPSRFSGSGSGTDYTLTISSLQPEDFATYYCVQ |
| | | | | YAQFPWTFGGGTKLEIKR |

### Example 2.25

### Generation of EGFR (seq. 2) and HGF DVD-IgS with Linker Set 1

TABLE 36

| | DVD | Outer | Inner | |
|---|---|---|---|---|
| SEQ | Variable | Variable | Variable | |
| ID | Domain | Domain | Domain | Sequence |
| NO | Name | Name | Name | 12345678901234567890123456789012345 |
| 155 | DVD335H | AB064VH | AB012VH | QVQLQESGPGLVKPSQTLSLTCTVSGYSISSDFAW |
| | | | | NWIRQPPGKGLEWMGYISYSGNTRYQPSLKSRITI |
| | | | | SRDTSKNQFFLKLNSVTAADTATYYCVTAGRGFPY |
| | | | | WGQGTLVTVSSASTKGPQVQLVESGGGLVKPGGSL |
| | | | | RLSCAASGFTFSDYYMSWIRQAPGKGLEWVSYISS |
| | | | | SGSTIYYADSVKGRFTISRDNAKNSLYLQMNSLRA |
| | | | | EDTAVYYCARDEYNSGWYVLFDYWGQGTLVTVSS |
| 156 | DVD335L | AB064VL | AB012VL | DIQMTQSPSSMSVSVGDRVTITCHSSQDINSNIGW |
| | | | | LQQKPGKSFKGLIYHGTNLDDGVPSRFSGSGSGTD |
| | | | | YTLTISSLQPEDFATYYCVQYAQFPWTFGGGTKLE |
| | | | | IKRTVAAPDIQMTQSPSSVSASVGDRVTITCRASQ |
| | | | | GISSWLAWYQQKPGKAPNLLIYEASSLQSGVPSRF |
| | | | | GGSGSGTDFTLTISSLQPEDFATYYCQQANGFPWT |
| | | | | FGQGTKVEIKR |
| 157 | DVD336H | AB012VH | AB064VH | QVQLVESGGGLVKPGGSLRLSCAASGFTFSDYYMS |
| | | | | WIRQAPGKGLEWVSYISSSGSTIYYADSVKGRFTI |
| | | | | SRDNAKNSLYLQMNSLRAEDTAVYYCARDEYNSGW |
| | | | | YVLFDYWGQGTLVTVSSASTKGPQVQLQESGPGLV |
| | | | | KPSQTLSLTCTVSGYSISSDFAWNWIRQPPGKGLE |
| | | | | WMGYISYSGNTRYQPSLKSRITISRDTSKNQFFLK |
| | | | | LNSVTAADTATYYCVTAGRGFPYWGQGTLVTVSS |
| 158 | DVD336L | AB012VL | AB064VL | DIQMTQSPSSVSASVGDRVTITCRASQGISSWLAW |
| | | | | YQQKPGKAPNLLIYEASSLQSGVPSRFGGSGSGTD |
| | | | | FTLTISSLQPEDFATYYCQQANGFPWTFGQGTKVE |
| | | | | IKRTVAAPDIQMTQSPSSMSVSVGDRVTITCHSSQ |
| | | | | DINSNIGWLQQKPGKSFKGLIYHGTNLDDGVPSRF |
| | | | | SGSGSGTDYTLTISSLQPEDFATYYCVQYAQFPWT |
| | | | | FGGGTKLEIKR |

### Example 2.26

### Generation of EGFR (seq. 2) and HGF DVD-Igs with Linker Set 2

TABLE 37

| | DVD | Outer | Inner | |
|---|---|---|---|---|
| SEQ | Variable | Variable | Variable | |
| ID | Domain | Domain | Domain | Sequence |
| NO | Name | Name | Name | 12345678901234567890123456789012345 |
| 159 | DVD777H | AB064VH | AB012VH | QVQLQESGPGLVKPSQTLSLTCTVSGYSISSDFAW |
| | | | | NWIRQPPGKGLEWMGYISYSGNTRYQPSLKSRITI |
| | | | | SRDTSKNQFFLKLNSVTAADTATYYCVTAGRGFPY |
| | | | | WGQGTLVTVSSASTKGPSVFPLAPQVQLVESGGGL |
| | | | | VKPGGSLRLSCAASGFTFSDYYMSWIRQAPGKGLE |
| | | | | WVSYISSSGSTIYYADSVKGRFTISRDNAKNSLYL |
| | | | | QMNSLRAEDTAVYYCARDEYNSGWYVLFDYWGQGT |
| | | | | LVTVSS |
| 160 | DVD777L | AB064VL | AB012VL | DIQMTQSPSSMSVSVGDRVTITCHSSQDINSNIGW |
| | | | | LQQKPGKSFKGLIYHGTNLDDGVPSRFSGSGSGTD |
| | | | | YTLTISSLQPEDFATYYCVQYAQFPWTFGGGTKLE |
| | | | | IKRTVAAPSVFIFPPDIQMTQSPSSVSASVGDRVT |
| | | | | ITCRASQGISSWLAWYQQKPGKAPNLLIYEASSLQ |
| | | | | SGVPSRFGGSGSGTDFTLTISSLQPEDFATYYCQQ |
| | | | | ANGFPWTFGQGTKVEIKR |
| 161 | DVD778H | AB012VH | AB064VH | QVQLVESGGGLVKPGGSLRLSCAASGFTFSDYYMS |
| | | | | WIRQAPGKGLEWVSYISSSGSTIYYADSVKGRFTI |
| | | | | SRDNAKNSLYLQMNSLRAEDTAVYYCARDEYNSGW |
| | | | | YVLFDYWGQGTLVTVSSASTKGPSVFPLAPQVQLQ |
| | | | | ESGPGLVKPSQTLSLTCTVSGYSISSDFAWNWIRQ |
| | | | | PPGKGLEWMGYISYSGNTRYQPSLKSRITISRDTS |
| | | | | KNQFFLKLNSVTAADTATYYCVTAGRGFPYWGQGT |
| | | | | LVTVSS |
| 162 | DVD778L | AB012VL | AB064VL | DIQMTQSPSSVSASVGDRVTITCRASQGISSWLAW |
| | | | | YQQKPGKAPNLLIYEASSLQSGVPSRFGGSGSGTD |
| | | | | FTLTISSLQPEDFATYYCQQANGFPWTFGQGTKVE |
| | | | | IKRTVAAPSVFIFPPDIQMTQSPSSMSVSVGDRVT |
| | | | | ITCHSSQDINSNIGWLQQKPGKSFKGLIYHGTNLD |
| | | | | DGVPSRFSGSGSGTDYTLTISSLQPEDFATYYCVQ |
| | | | | YAQFPWTFGGGTKLEIKR |

### Example 2.27

### Generation of EGFR (seq. 2) and HGF DVD-Igs with Linker Set 3

TABLE 38

| | DVD | Outer | Inner | |
|---|---|---|---|---|
| SEQ | Variable | Variable | Variable | |
| ID | Domain | Domain | Domain | Sequence |
| NO | Name | Name | Name | 12345678901234567890123456789012345 |
| 163 | DVD807H | AB064VH | AB012VH | QVQLQESGPGLVKPSQTLSLTCTVSGYSISSDFAW |
| | | | | NWIRQPPGKGLEWMGYISYSGNTRYQPSLKSRITI |
| | | | | SRDTSKNQFFLKLNSVTAADTATYYCVTAGRGFPY |
| | | | | WGQGTLVTVSSASTKGPSVFPLAPQVQLVESGGGL |
| | | | | VKPGGSLRLSCAASGFTFSDYYMSWIRQAPGKGLE |
| | | | | WVSYISSSGSTIYYADSVKGRFTISRDNAKNSLYL |
| | | | | QMNSLRAEDTAVYYCARDEYNSGWYVLFDYWGQGT |
| | | | | LVTVSS |
| 164 | DVD807L | AB064VL | AB012VL | DIQMTQSPSSMSVSVGDRVTITCHSSQDINSNIGW |
| | | | | LQQKPGKSFKGLIYHGTNLDDGVPSRFSGSGSGTD |
| | | | | YTLTISSLQPEDFATYYCVQYAQFPWTFGGGTKLE |
| | | | | IKRTVAAPDIQMTQSPSSVSASVGDRVTITCRASQ |
| | | | | GISSWLAWYQQKPGKAPNLLIYEASSLQSGVPSRF |
| | | | | GGSGSGTDFTLTISSLQPEDFATYYCQQANGFPWT |
| | | | | FGQGTKVEIKR |
| 165 | DVD808H | AB012VH | AB064VH | QVQLVESGGGLVKPGGSLRLSCAASGFTFSDYYMS |
| | | | | WIRQAPGKGLEWVSYISSSGSTIYYADSVKGRFTI |
| | | | | SRDNAKNSLYLQMNSLRAEDTAVYYCARDEYNSGW |
| | | | | YVLFDYWGQGTLVTVSSASTKGPSVFPLAPQVQLQ |
| | | | | ESGPGLVKPSQTLSLTCTVSGYSISSDFAWNWIRQ |
| | | | | PPGKGLEWMGYISYSGNTRYQPSLKSRITISRDTS |
| | | | | KNQFFLKLNSVTAADTATYYCVTAGRGFPYWGQGT |
| | | | | LVTVSS |
| 166 | DVD808L | AB012VL | AB064VL | DIQMTQSPSSVSASVGDRVTITCRASQGISSWLAW |
| | | | | YQQKPGKAPNLLIYEASSLQSGVPSRFGGSGSGTD |
| | | | | FTLTISSLQPEDFATYYCQQANGFPWTFGQGTKVE |
| | | | | IKRTVAAPDIQMTQSPSSMSVSVGDRVTITCHSSQ |
| | | | | DINSNIGWLQQKPGKSFKGLIYHGTNLDDGVPSRF |
| | | | | SGSGSGTDYTLTISSLQPEDFATYYCVQYAQFPWT |
| | | | | FGGGTKLEIKR |

### Example 2.28

### Generation of EGFR (seq. 2) and HGF DVD-IgS with Linker Set 4

TABLE 39

| | DVD | Outer | Inner | |
|---|---|---|---|---|
| SEQ | Variable | Variable | Variable | |
| ID | Domain | Domain | Domain | Sequence |
| NO | Name | Name | Name | 12345678901234567890123456789012345 |
| 167 | DVD837H | AB064VH | AB012VH | QVQLQESGPGLVKPSQTLSLTCTVSGYSISSDFAW |
| | | | | NWIRQPPGKGLEWMGYISYSGNTRYQPSLKSRITI |
| | | | | SRDTSKNQFFLKLNSVTAADTATYYCVTAGRGFPY |
| | | | | WGQGTLVTVSSASTKGPQVQLVESGGGLVKPGGSL |
| | | | | RLSCAASGFTFSDYYMSWIRQAPGKGLEWVSYISS |
| | | | | SGSTIYYADSVKGRFTISRDNAKNSLYLQMNSLRA |
| | | | | EDTAVYYCARDEYNSGWYVLFDYWGQGTLVTVSS |
| 168 | DVD837L | AB064VL | AB012VL | DIQMTQSPSSMSVSVGDRVTITCHSSQDINSNIGW |
| | | | | LQQKPGKSFKGLIYHGTNLDDGVPSRFSGSGSGTD |
| | | | | YTLTISSLQPEDFATYYCVQYAQFPWTFGGGTKLE |
| | | | | IKRTVAAPSVFIFPPDIQMTQSPSSVSASVGDRVT |
| | | | | ITCRASQGISSWLAWYQQKPGKAPNLLIYEASSLQ |
| | | | | SGVPSRFGGSGSGTDFTLTISSLQPEDFATYYCQQ |
| | | | | ANGFPWTFGQGTKVEIKR |
| 169 | DVD838H | AB012VH | AB064VH | QVQLVESGGGLVKPGGSLRLSCAASGFTFSDYYMS |
| | | | | WIRQAPGKGLEWVSYISSSGSTIYYADSVKGRFTI |
| | | | | SRDNAKNSLYLQMNSLRAEDTAVYYCARDEYNSGW |
| | | | | YVLFDYWGQGTLVTVSSASTKGPQVQLQESGPGLV |
| | | | | KPSQTLSLTCTVSGYSISSDFAWNWIRQPPGKGLE |
| | | | | WMGYISYSGNTRYQPSLKSRITISRDTSKNQFFLK |
| | | | | LNSVTAADTATYYCVTAGRGFPYWGQGTLVTVSS |
| 170 | DVD838L | AB012VL | AB064VL | DIQMTQSPSSVSASVGDRVTITCRASQGISSWLAW |
| | | | | YQQKPGKAPNLLIYEASSLQSGVPSRFGGSGSGTD |
| | | | | FTLTISSLQPEDFATYYCQQANGFPWTFGQGTKVE |
| | | | | IKRTVAAPSVFIFPPDIQMTQSPSSMSVSVGDRVT |
| | | | | ITCHSSQDINSNIGWLQQKPGKSFKGLIYHGTNLD |
| | | | | DGVPSRFSGSGSGIDYTLTISSLQPEDFATYYCVQ |
| | | | | YAQFPWTFGGGTKLEIKR |

### Example 2.29

### Generation of EGFR (seq. 2) and VEGF (seq. 1) DVD-IgS with Linker Set 1

TABLE 40

| | DVD | Outer | Inner | |
|---|---|---|---|---|
| SEQ | Variable | Variable | Variable | |
| ID | Domain | Domain | Domain | Sequence |
| NO | Name | Name | Name | 12345678901234567890123456789012345 |
| 171 | DV1637H | AB064VH | AB014VH | QVQLQESGPGLVKPSQTLSLTCTVSGYSISSDFAW |
| | | | | NWIRQPPGKGLEWMGYISYSGNTRYQPSLKSRITI |
| | | | | SRDTSKNQFFLKLNSVTAADTATYYCVTAGRGFPY |
| | | | | WGQGTLVTVSSASTKGPEVQLVESGGGLVQPGGSL |
| | | | | RLSCAASGYTFTNYGMNWVRQAPGKGLEWVGWINT |
| | | | | YTGEPTYAADFKRRFTFSLDTSKSTAYLQMNSLRA |
| | | | | EDTAVYYCAKYPHYYGSSHWYFDVWGQGTLVTVSS |
| 172 | DVD337L | AB064VL | AB014VL | DIQMTQSPSSMSVSVGDRVTITCHSSQDINSNIGW |
| | | | | LQQKPGKSFKGLIYHGTNLDDGVPSRFSGSGSGTD |
| | | | | YTLTISSLQPEDFATYYCVQYAQFPWTFGGGTKLE |
| | | | | IKRTVAAPDIQMTQSPSSLSASVGDRVTITCSASQ |
| | | | | DISNYLNWYQQKPGKAPKVLIYFTSSLHSGVPSRF |
| | | | | SGSGSGTDFTLTISSLQPEDFATYYCQQYSTVPWT |
| | | | | FGQGTKVEIKR |
| 173 | DVD338H | AB014VH | AB064VH | EVQLVESGGGLVQPGGSLRLSCAASGYTFTNYGMN |
| | | | | WVRQAPGKGLEWVGWINTYTGEPTYAADFKRRFTF |
| | | | | SLDTSKSTAYLQMNSLRAEDTAVYYCAKYPHYYGS |
| | | | | SHWYFDVWGQGTLVTVSSASTKGPQVQLQESGPGL |
| | | | | VKPSQTLSLTCTVSGYSISSDFAWNWIRQPPGKGL |
| | | | | EWMGYISYSGNTRYQPSLKSRITISRDASKNQFFL |
| | | | | KLNSVTAADTATYYCVTAGRGFPYWGQGTLVTVSS |
| 174 | DVD338L | AB014VL | AB064VL | DIQMTQSPSSLSASVGDRVTITCSASQDISNYLNW |
| | | | | YQQKPGKAPKVLIYFTSSLHSGVPSRFSGSGSGTD |
| | | | | FTLTISSLQPEDFATYYCQQYSTVPWTFGQGTKVE |
| | | | | IKRTVAAPDIQMTQSPSSMSVSVGDRVTITCHSSQ |
| | | | | DINSNIGWLQQKPGKSFKGLIYHGTNLDDGVPSRF |
| | | | | SGSGSGTDYTLTISSLQPEDFATYYCVQYAQFPWT |
| | | | | FGGGTKLEIKR |

### Example 2.30

### Generation of EGFR (seq. 2) and VEGF (seq. 1) DVD-Igs with Linker Set 2

TABLE 41

| | DVD | Outer | Inner | |
|---|---|---|---|---|
| SEQ | Variable | Variable | Variable | |
| ID | Domain | Domain | Domain | Sequence |
| NO | Name | Name | Name | 12345678901234567890123456789012345 |
| 175 | DVD779H | AB064VH | AB014VH | QVQLQESGPGLVKPSQTLSLTCTVSGYSISSDFAW |
| | | | | NWIRQPPGKGLEWMGYISYSGNTRYQPSLKSRITI |
| | | | | SRDTSKNQFFLKLNSVTAADTATYYCVTAGRGFPY |
| | | | | WGQGTLVTVSSASTKGPSVFPLAPEVQLVESGGGL |
| | | | | VQPGGSLRLSCAASGYTFTNYGMNWVRQAPGKGLE |
| | | | | WVGWINTYTGEPTYAADFKRRFTFSLDTSKSTAYL |
| | | | | QMNSLRAEDTAVYYCAKYPHYYGSSHWYFDVWGQG |
| | | | | TLVTVSS |
| 176 | DVD779L | AB064VL | AB014VL | DIQMTQSPSSMSVSVGDRVTITCHSSQDINSNIGW |
| | | | | LQQKPGKSFKGLIYHGTNLDDGVPSRFSGSGSGTD |
| | | | | YTLTISSLQPEDFATYYCVQYAQFPWTFGGGTKLE |
| | | | | IKRTVAAPSVFIFPPDIQMTQSPSSLSASVGDRVT |
| | | | | ITCSASQDISNYLNWYQQKPGKAPKVLIYFTSSLH |
| | | | | SGVPSRFSGSGSGTDFTLTISSLQPEDFATYYCQQ |
| | | | | YSTVPWTFGQGTKVEIKR |
| 177 | DVD780H | AB014VH | AB064VH | EVQLVESGGGLVQPGGSLRLSCAASGYTFTNYGMN |
| | | | | WVRQAPGKGLEWVGWINTYTGEPTYAADFKRRFTF |
| | | | | SLDTSKSTAYLQMNSLRAEDTAVYYCAKYPHYYGS |
| | | | | SHWYFDVWGQGTLVTVSSASTKGPSVFPLAPQVQL |
| | | | | QESGPGLVKPSQTLSLTCTVSGYSISSDFAWNWIR |
| | | | | QPPGKGLEWMGYISYSGNTRYQPSLKSRITISRDT |
| | | | | SKNQFFLKLNSVTAADTATYYCVTAGRGFPYWGQG |
| | | | | TLVTVSS |
| 178 | DVD780L | AB014VL | AB064VL | DIQMTQSPSSLSASVGDRVTITCSASQDISNYLNW |
| | | | | YQQKPGKAPKVLIYFTSSLHSGVPSRFSGSGSGTD |
| | | | | FTLTISSLQPEDFATYYCQQYSTVPWTFGQGTKVE |
| | | | | IKRTVAAPSVFIFPPDIQMTQSPSSMSVSVGDRVT |
| | | | | ITCHSSQDINSNIGWLQQKPGKSFKGLIYHGTNLD |
| | | | | DGVPSRFSGSGSGTDYTLTISSLQPEDFATYYCVQ |
| | | | | YAQFPWTFGGGTKLEIKR |

### Example 2.31

### Generation of EGFR (seq. 2) and VEGF (seq. 1) DVD-Igs with Linker Set 3

TABLE 42

| | DVD | Outer | Inner | |
|---|---|---|---|---|
| SEQ | Variable | Variable | Variable | |
| ID | Domain | Domain | Domain | Sequence |
| NO | Name | Name | Name | 12345678901234567890123456789012345 |
| 179 | DVD809H | AB064VH | AB014VH | QVQLQESGPGLVKPSQTLSLTCTVSGYSISSDFAW |
| | | | | NWIRQPPGKGLEWMGYISYSGNTRYQPSLKSRITI |
| | | | | SRDTSKNQFFLKLNSVTAADTATYYCVTAGRGFPY |
| | | | | WGQGTLVTVSSASTKGPSVFPLAPEVQLVESGGGL |
| | | | | VQPGGSLRLSCAASGYTFTNYGMNWVRQAPGKGLE |
| | | | | WVGWINTYTGEPTYAADFKRRFTFSLDTSKSTAYL |
| | | | | QMNSLRAEDTAVYYCAKYPHYYGSSHWYFDVWGQG |
| | | | | TLVTVSS |
| 180 | DVD809L | AB064VL | AB014VL | DIQMTQSPSSMSVSVGDRVTITCHSSQDINSNIGW |
| | | | | LQQKPGKSFKGLIYHGTNLDDGVPSRFSGSGSGTD |
| | | | | YTLTISSLQPEDFATYYCVQYAQFPWTFGGGTKLE |
| | | | | IKRTVAAPDIQMTQSPSSLSASVGDRVTITCSASQ |
| | | | | DISNYLNWYQQKPGKAPKVLIYFTSSLHSGVPSRF |
| | | | | SGSGSGTDFTLTISSLQPEDFATYYCQQYSTVPWT |
| | | | | FGQGTKVEIKR |
| 181 | DVD810H | AB014VH | AB064VH | EVQLVESGGGLVQPGGSLRLSCAASGYTFTNYGMN |
| | | | | WVRQAPGKGLEWVGWINTYTGEPTYAADFKRRFTF |
| | | | | SLDTSKSTAYLQMNSLRAEDTAVYYCAKYPHYYGS |
| | | | | SHWYFDVWGQGTLVTVSSASTKGPSVFPLAPQVQL |
| | | | | QESGPGLVKPSQTLSLTCTVSGYSISSDFAWNWIR |
| | | | | QPPGKGLEWMGYISYSGNTRYQPSLKSRITISRDT |
| | | | | SKNQFFLKLNSVTAADTATYYCVTAGRGFPYWGQG |
| | | | | TLVTVSS |
| 182 | DVD810L | AB014VL | AB064VL | DIQMTQSPSSLSASVGDRVTITCSASQDISNYLNW |
| | | | | YQQKPGKAPKVLIYFTSSLHSGVPSRFSGSGSGTD |
| | | | | FTLTISSLQPEDFATYYCQQYSTVPWTFGQGTKVE |
| | | | | IKRTVAAPDIQMTQSPSSMSVSVGDRVTITCHSSQ |
| | | | | DINSNIGWLQQKPGKSFKGLIYHGTNLDDGVPSRF |
| | | | | SGSGSGTDYTLTISSLQPEDFATYYCVQYAQFPWT |
| | | | | FGGGTKLEIKR |

### Example 2.32

### Generation of EGFR (seq. 2) and VEGF (seq. 1) DVD-IgS with Linker Set 4

TABLE 43

| | DVD | Outer | Inner | |
|---|---|---|---|---|
| SEQ | Variable | Variable | Variable | |
| ID | Domain | Domain | Domain | Sequence |
| NO | Name | Name | Name | 12345678901234567890123456789012345 |
| 183 | DVD839H | AB064VH | AB014VH | QVQLQESGPGLVKPSQTLSLTCTVSGYSISSDFAW |
| | | | | NWIRQPPGKGLEWMGYISYSGNTRYQPSLKSRITI |
| | | | | SRDTSKNQFFLKLNSVTAADTATYYCVTAGRGFPY |
| | | | | WGQGTLVTVSSASTKGPEVQLVESGGGLVQPGGSL |
| | | | | RLSCAASGYTFTNYGMNWVRQAPGKGLEWVGWINT |
| | | | | YTGEPTYAADFKRRFTFSLDTSKSTAYLQMNSLRA |
| | | | | EDTAVYYCAKYPHYYGSSHWYFDVWGQGTLVTVSS |
| 184 | DVD839L | AB064VL | AB014VL | DIQMTQSPSSMSVSVGDRVTITCHSSQDINSNIGW |
| | | | | LQQKPGKSFKGLIYHGTNLDDGVPSRFSGSGSGTD |
| | | | | YTLTISSLQPEDFATYYCVQYAQFPWTFGGGTKLE |
| | | | | IKRTVAAPSVFIFPPDIQMTQSPSSLSASVGDRVT |
| | | | | ITCSASQDISNYLNWYQQKPGKAPKVLIYFTSSLH |
| | | | | SGVPSRFSGSGSGTDFTLTISSLQPEDFATYYCQQ |
| | | | | YSTVPWTFGQGTKVEIKR |
| 185 | DVD840H | AB014VH | AB064VH | EVQLVESGGGLVQPGGSLRLSCAASGYTFTNYGMN |
| | | | | WVRQAPGKGLEWVGWINTYTGEPTYAADFKRRFTF |
| | | | | SLDTSKSTAYLQMNSLRAEDTAVYYCAKYPHYYGS |
| | | | | SHWYFDVWGQGTLVTVSSASTKGPQVQLQESGPGL |
| | | | | VKPSQTLSLTCTVSGYSISSDFAWNWIRQPPGKGL |
| | | | | EWMGYISYSGNTRYQPSLKSRITISRDTSKNQFFL |
| | | | | KLNSVTAADTATYYCVTAGRGFPYWGQGTLVTVSS |
| 186 | DVD840L | AB014VL | AB064VL | DIQMTQSPSSLSASVGDRVTITCSASQDISNYLNW |
| | | | | YQQKPGKAPKVLIYFTSSLHSGVPSRFSGSGSGTD |
| | | | | FTLTISSLQPEDFATYYCQQYSTVPWTFGQGTKVE |
| | | | | IKRTVAAPSVFIFPPDIQMTQSPSSMSVSVGDRVT |
| | | | | ITCHSSQDINSNIGWLQQKPGKSFKGLIYHGTNLD |
| | | | | DGVPSRFSGSGSGTDYTLTISSLQPEDFATYYCVQ |
| | | | | YAQFPWTFGGGTKLEIKR |

### Example 2.33

### Generation of EGFR (seq. 2) and DLL-4 DVD-IgS with Linker Set 1

TABLE 44

| | DVD | Outer | Inner | |
|---|---|---|---|---|
| SEQ | Variable | Variable | Variable | |
| ID | Domain | Domain | Domain | Sequence |
| NO | Name | Name | Name | 12345678901234567890123456789012345 |
| 187 | DVD339H | AB064VH | AB015VH | QVQLQESGPGLVKPSQTLSLTCTVSGYSISSDFAW |
| | | | | NWIRQPPGKGLEWMGYISYSGNTRYQPSLKSRITI |
| | | | | SRDTSKNQFFLKLNSVTAADTATYYCVTAGRGFPY |
| | | | | WGQGTLVTVSSASTKGPEVQLVESGGGLVQPGGSL |
| | | | | RLSCAASGFTFTDNWISWVRQAPGKGLEWVGYISP |
| | | | | NSGFTYYADSVKGRFTISADTSKNTAYLQMNSLRA |
| | | | | EDTAVYYCARDNFGGYFDYWGQGTLVTVSS |
| 188 | DVD339L | AB064VL | AB015VL | DIQMTQSPSSMSVSVGDRVTITCHSSQDINSNIGW |
| | | | | LQQKPGKSFKGLIYHGTNLDDGVPSRFSGSGSGTD |
| | | | | YTLTISSLQPEDFATYYCVQYAQFPWTFGGGTKLE |
| | | | | IKRTVAAPDIQMTQSPSSLSASVGDRVTITCRASQ |
| | | | | DVSTAVAWYQQKPGKAPKLLIYSASFLYSGVPSRF |
| | | | | SGSGSGTDFTLTISSLQPEDFATIYYCQQSYTGTV |
| | | | | TFGQGTKVEIKR |
| 189 | DVD340H | AB015VH | AB064VH | EVQLVESGGGLVQPGGSLRLSCAASGFTFTDNWIS |
| | | | | WVRQAPGKGLEWVGYISPNSGFTYYADSVKGRFTI |
| | | | | SADTSKNTAYLQMNSLRAEDTAVYYCARDNFGGYF |
| | | | | DYWGQGTLVTVSSASTKGPQVQLQESGPGLVKPSQ |
| | | | | TLSLTCTVSGYSISSDFAWNWIRQPPGKGLEWMGY |
| | | | | ISYSGNTRYQPSLKSRITISRDTSKNQFFLKLNSV |
| | | | | TAADTATYYCVTAGRGFPYWGQGTLVTVSS |
| 190 | DVD340L | AB015VL | AB064VL | DIQMTQSPSSLSASVGDRVTITCRASQDVSTAVAW |
| | | | | YQQKPGKAPKLLIYSASFLYSGVPSRFSGSGSGTD |
| | | | | FTLTISSLQPEDFATTYYCQQSYTGTVTFGQGTKV |
| | | | | EIKRTVAAPDIQMTQSPSSMSVSVGDRVTITCHSS |
| | | | | QDINSNIGWLQQKPGKSFKGLIYHGTNLDDGVPSR |
| | | | | FSGSGSGTDYTLTISSLQPEDFATYYCVQYAQFPW |
| | | | | TFGGGTKLEIKR |

### Example 2.34

### Generation of EGFR (seq. 2) and DLL-4 DVD-IgS with Linker Set 2

TABLE 45

| | DVD | Outer | Inner | |
|---|---|---|---|---|
| SEQ | Variable | Variable | Variable | |
| ID | Domain | Domain | Domain | Sequence |
| NO | Name | Name | Name | 12345678901234567890123456789012345 |
| 191 | DVD781H | AB064VH | AB015VH | QVQLQESGPGLVKPSQTLSLTCTVSGYSISSDFAW |
| | | | | NWIRQPPGKGLEWMGYISYSGNTRYQPSLKSRITI |
| | | | | SRDTSKNQFFLKLNSVTAADTATYYCVTAGRGFPY |
| | | | | WGQGTLVTVSSASTKGPSVFPLAPEVQLVESGGGL |
| | | | | VQPGGSLRLSCAASGFTFTDNWISWVRQAPGKGLE |
| | | | | WVGYISPNSGFTYYADSVKGRFTISADTSKNTAYL |
| | | | | QMNSLRAEDTAVYYCARDNFGGYFDYWGQGTLVTV |
| | | | | SS |
| 192 | DVD781L | AB064VL | AB015VL | DIQMTQSPSSMSVSVGDRVTITCHSSQDINSNIGW |
| | | | | LQQKPGKSFKGLIYHGTNLDDGVPSRFSGSGSGTD |
| | | | | YTLTISSLQPEDFATYYCVQYAQFPWTFGGGTKLE |
| | | | | IKRTVAAPSVFIFPPDIQMTQSPSSLSASVGDRVT |
| | | | | ITCRASQDVSTAVAWYQQKPGKAPKLLIYSASFLY |
| | | | | SGVPSRFSGSGSGTDFTLTISSLQPEDFATTYYCQ |
| | | | | QSYTGTVTFGQGTKVEIKR |
| 193 | DVD782H | AB015VH | AB064VH | EVQLVESGGGLVQPGGSLRLSCAASGFTFTDNWIS |
| | | | | WVRQAPGKGLEWVGYISPNSGFTYYADSVKGRFTI |
| | | | | SADTSKNTAYLQMNSLRAEDTAVYYCARDNFGGYF |
| | | | | DYWGQGTLVTVSSASTKGPSVFPLAPQVQLQESGP |
| | | | | GLVKPSQTLSLTCTVSGYSISSDFAWNWIRQPPGK |
| | | | | GLEWMGYISYSGNTRYQPSLKSRITISRDTSKNQF |
| | | | | FLKLNSVTAADTATYYCVTAGRGFPYWGQGTLVTV |
| | | | | SS |
| 194 | DVD782L | AB015VL | AB064VL | DIQMTQSPSSLSASVGDRVTITCRASQDVSTAVAW |
| | | | | YQQKPGKAPKLLIYSASFLYSGVPSRFSGSGSGTD |
| | | | | FTLTISSLQPEDFATTYYCQQSYTGTVTFGQGTKV |
| | | | | EIKRTVAAPSVFIFPPDIQMTQSPSSMSVSVGDRV |
| | | | | TITCHSSQDINSNIGWLQQKPGKSFKGLIYHGTNL |
| | | | | DDGVPSRFSGSGSGTDYTLTISSLQPEDFATYYCV |
| | | | | QYAQFPWTFGGGTKLEIKR |

### Example 2.35

### Generation of EGFR (seq. 2) and DLL-4 DVD-IgS with Linker Set 3

TABLE 46

| | DVD | Outer | Inner | |
|---|---|---|---|---|
| SEQ | Variable | Variable | Variable | |
| ID | Domain | Domain | Domain | Sequence |
| NO | Name | Name | Name | 12345678901234567890123456789012345 |
| 195 | DVD811H | AB064VH | AB015VH | QVQLQESGPGLVKPSQTLSLTCTVSGYSISSDFAW |
| | | | | NWIRQPPGKGLEWMGYISYSGNTRYQPSLKSRITI |
| | | | | SRDTSKNQFFLKLNSVTAADTATYYCVTAGRGFPY |
| | | | | WGQGTLVTVSSASTKGPSVFPLAPEVQLVESGGGL |
| | | | | VQPGGSLRLSCAASGFTFTDNWISWVRQAPGKGLE |
| | | | | WVGYISPNSGFTYYADSVKGRFTISADTSKNTAYL |
| | | | | QMNSLRAEDTAVYYCARDNFGGYFDYWGQGTLVTV |
| | | | | SS |
| 196 | DVD811L | AB064VL | AB015VL | DIQMTQSPSSMSVSVGDRVTITCHSSQDINSNIGW |
| | | | | LQQKPGKSFKGLIYHGTNLDDGVPSRFSGSGSGTD |
| | | | | YTLTISSLQPEDFATYYCVQYAQFPWTFGGGTKLE |
| | | | | IKRTVAAPDIQMTQSPSSLSASVGDRVTITCRASQ |
| | | | | DVSTAVAWYQQKPGKAPKLLIYSASFLYSGVPSRF |
| | | | | SGSGSGTDFTLTISSLQPEDFATTYYCQQSYTGTV |
| | | | | TFGQGTKVEIKR |
| 197 | DVD812H | AB015VH | AB064VH | EVQLVESGGGLVQPGGSLRLSCAASGFTFTDNWIS |
| | | | | WVRQAPGKGLEWVGYISPNSGFTYYADSVKGRFTI |
| | | | | SADTSKNTAYLQMNSLRAEDTAVYYCARDNFGGYF |
| | | | | DYWGQGTLVTVSSASTKGPSVFPLAPQVQLQESGP |
| | | | | GLVKPSQTLSLTCTVSGYSISSDFAWNWIRQPPGK |
| | | | | GLEWMGYISYSGNTRYQPSLKSRITISRDTSKNQF |
| | | | | FLKLNSVTAADTATYYCVTAGRGFPYWGQGTLVTV |
| | | | | SS |
| 198 | DVD812L | AB015VL | AB064VL | DIQMTQSPSSLSASVGDRVTITCRASQDVSTAVAW |
| | | | | YQQKPGKAPKLLIYSASFLYSGVPSRFSGSGSGTD |
| | | | | FTLTISSLQPEDFATTYYCQQSYTGTVTFGQGTKV |
| | | | | EIKRTVAAPDIQMTQSPSSMSVSVGDRVTITCHSS |
| | | | | QDINSNIGWLQQKPGKSFKGLIYHGTNLDDGVPSR |
| | | | | FSGSGSGTDYTLTISSLQPEDFATYYCVQYAQFPW |
| | | | | TFGGGTKLEIKR |

### Example 2.36

### Generation of EGFR (seq. 2) and DLL-4 DVD-IgS with Linker Set 4

TABLE 47

| | DVD | Outer | Inner | |
|---|---|---|---|---|
| SEQ | Variable | Variable | Variable | |
| ID | Domain | Domain | Domain | Sequence |
| NO | Name | Name | Name | 12345678901234567890123456789012345 |
| 199 | DVD841H | AB064VH | AB015VH | QVQLQESGPGLVKPSQTLSLTCTVSGYSISSDFAW |
| | | | | NWIRQPPGKGLEWMGYISYSGNTRYQPSLKSRITI |
| | | | | SRDTSKNQFFLKLNSVTAADTATYYCVTAGRGFPY |
| | | | | WGQGTLVTVSSASTKGPEVQLVESGGGLVQPGGSL |
| | | | | RLSCAASGFTFTDNWISWVRQAPGKGLEWVGYISP |
| | | | | NSGFTYYADSVKGRFTISADTSKNTAYLQMNSLRA |
| | | | | EDTAVYYCARDNFGGYFDYWGQGTLVTVSS |
| 200 | DVD841L | AB064VL | AB015VL | DIQMTQSPSSMSVSVGDRVTITCHSSQDINSNIGW |
| | | | | LQQKPGKSFKGLIYHGTNLDDGVPSRFSGSGSGTD |
| | | | | YTLTISSLQPEDFATYYCVQYAQFPWTFGGGTKLE |
| | | | | IKRTVAAPSVFIFPPDIQMTQSPSSLSASVGDRVT |
| | | | | ITCRASQDVSTAVAWYQQKPGKAPKLLIYSASFLY |
| | | | | SGVPSRFSGSGSGTDFTLTISSLQPEDFATTYYCQ |
| | | | | QSYTGTVTFGQGTKVEIKR |
| 201 | DVD842H | AB015VH | AB064VH | EVQLVESGGGLVQPGGSLRLSCAASGFTFTDNWIS |
| | | | | WVRQAPGKGLEWVGYISPNSGFTYYADSVKGRFTI |
| | | | | SADTSKNTAYLQMNSLRAEDTAVYYCARDNFGGYF |
| | | | | DYWGQGTLVTVSSASTKGPQVQLQESGPGLVKPSQ |
| | | | | TLSLTCTVSGYSISSDFAWNWIRQPPGKGLEWMGY |
| | | | | ISYSGNTRYQPSLKSRITISRDTSKNQFFLKLNSV |
| | | | | TAADTATYYCVTAGRGFPYWGQGTLVTVSS |
| 202 | DVD842L | AB015VL | AB064VL | DIQMTQSPSSLSASVGDRVTITCRASQDVSTAVAW |
| | | | | YQQKPGKAPKLLIYSASFLYSGVPSRFSGSGSGTD |
| | | | | FTLTISSLQPEDFATTYYCQQSYTGTVTFGQGTKV |
| | | | | EIKRTVAAPSVFIFPPDIQMTQSPSSMSVSVGDRV |
| | | | | TITCHSSQDINSNIGWLQQKPGKSFKGLIYHGTNL |
| | | | | DDGVPSRFSGSGSGIDYTLTISSLQPEDFATYYCV |
| | | | | QYAQFPWTFGGGTKLEIKR |

### Example 2.37

### Generation of EGFR (seq. 2) and PLGF DVD-IgS with Linker Set 1

TABLE 48

| | DVD | Outer | Inner | |
|---|---|---|---|---|
| SEQ | Variable | Variable | Variable | |
| ID | Domain | Domain | Domain | Sequence |
| NO | Name | Name | Name | 12345678901234567890123456789012345 |
| 203 | DVD341H | AB064VH | AB047VH | QVQLQESGPGLVKPSQTLSLTCTVSGYSISSDFAW |
| | | | | NWIRQPPGKGLEWMGYISYSGNTRYQPSLKSRITI |
| | | | | SRDASKNQFFLKLNSVTAADTATYYCVTAGRGFPY |
| | | | | WGQGTLVTVSSASTKGPQVQLQQSGAELVKPGASV |
| | | | | KISCKASGYTFTDYYINWVKLAPGQGLEWIGWIYP |
| | | | | GSGNTKYNEKFKGKATLTIDTSSSTAYMQLSSLTS |
| | | | | EDTAVYFCVRDSPFFDYWGQGTLLTVSS |
| 204 | DVD341L | AB064VL | AB047VL | DIQMTQSPSSMSVSVGDRVTITCHSSQDINSNIGW |
| | | | | LQQKPGKSFKGLIYHGTNLDDGVPSRFSGSGSGTD |
| | | | | YTLTISSLQPEDFATYYCVQYAQFPWTFGGGTKLE |
| | | | | IKRTVAAPDIVLTQSPDSLAVSLGERVTMNCKSSQ |
| | | | | SLLNSGMRKSFLAWYQQKPGQSPKLLIYWASTRES |
| | | | | GVPDRFTGSGSGTDFTLTISSVQAEDVAVYYCKQS |
| | | | | YHLFTFGSGTKLEIKR |
| 205 | DVD342H | AB047VH | AB064VH | QVQLQQSGAELVKPGASVKISCKASGYTFTDYYIN |
| | | | | WVKLAPGQGLEWIGWIYPGSGNTKYNEKFKGKATL |
| | | | | TIDTSSSTAYMQLSSLTSEDTAVYFCVRDSPFFDY |
| | | | | WGQGTLLTVSSASTKGPQVQLQESGPGLVKPSQTL |
| | | | | SLTCTVSGYSISSDFAWNWIRQPPGKGLEWMGYIS |
| | | | | YSGNTRYQPSLKSRITISRDTSKNQFFLKLNSVTA |
| | | | | ADTATYYCVTAGRGFPYWGQGTLVTVSS |
| 206 | DVD342L | AB047VL | AB064VL | DIVLTQSPDSLAVSLGERVTMNCKSSQSLLNSGMR |
| | | | | KSFLAWYQQKPGQSPKLLIYWASTRESGVPDRFTG |
| | | | | SGSGTDFTLTISSVQAEDVAVYYCKQSYHLFTFGS |
| | | | | GTKLEIKRTVAAPDIQMTQSPSSMSVSVGDRVTIT |
| | | | | CHSSQDINSNIGWLQQKPGKSFKGLIYHGTNLDDG |
| | | | | VPSRFSGSGSGTDYTLTISSLQPEDFATYYCVQYA |
| | | | | QFPWTFGGGTKLEIKR |

### Example 2.38

### Generation of EGFR (seq. 2) and PLGF DVD-Igs with Linker Set 2

TABLE 49

| | DVD | Outer | Inner | |
|---|---|---|---|---|
| SEQ | Variable | Variable | Variable | |
| ID | Domain | Domain | Domain | Sequence |
| NO | Name | Name | Name | 12345678901234567890123456789012345 |
| 207 | DVD783H | AB064VH | AB047VH | QVQLQESGPGLVKPSQTLSLTCTVSGYSISSDFAW |
| | | | | NWIRQPPGKGLEWMGYISYSGNTRYQPSLKSRITI |
| | | | | SRDTSKNQFFLKLNSVTAADTATYYCVTAGRGFPY |
| | | | | WGQGTLVTVSSASTKGPSVFPLAPQVQLQQSGAEL |
| | | | | VKPGASVKISCKASGYTFTDYYINWVKLAPGQGLE |
| | | | | WIGWIYPGSGNTKYNEKFKGKATLTIDTSSSTAYM |
| | | | | QLSSLTSEDTAVYFCVRDSPFFDYWGQGTLLTVSS |
| 208 | DVD783L | AB064VL | AB047VL | DIQMTQSPSSMSVSVGDRVTITCHSSQDINSNIGW |
| | | | | LQQKPGKSFKGLIYHGTNLDDGVPSRFSGSGSGTD |
| | | | | YTLTISSLQPEDFATYYCVQYAQFPWTFGGGTKLE |
| | | | | IKRTVAAPSVFIFPPDIVLTQSPDSLAVSLGERVT |
| | | | | MNCKSSQSLLNSGMRKSFLAWYQQKPGQSPKLLIY |
| | | | | WASTRESGVPDRFTGSGSGTDFTLTISSVQAEDVA |
| | | | | VYYCKQSYHLFTFGSGTKLEIKR |
| 209 | DVD784H | AB047VH | AB064Vh | QVQLQQSGAELVKPGASVKISCKASGYTFTDYYIN |
| | | | | WVKLAPGQGLEWIGWIYPGSGNTKYNEKFKGKATL |
| | | | | TIDTSSSTAYMQLSSLTSEDTAVYFCVRDSPFFDY |
| | | | | WGQGTLLTVSSASTKGPSVFPLAPQVQLQESGPGL |
| | | | | VKPSQTLSLTCTVSGYSISSDFAWNWIRQPPGKGL |
| | | | | EWMGYISYSGNTRYQPSLKSRITISRDTSKNQFFL |
| | | | | KLNSVTAADTATYYCVTAGRGFPYWGQGTLVTVSS |
| 210 | DVD784L | AB047VL | AB064VL | DIVLTQSPDSLAVSLGERVTMNCKSSQSLLNSGMR |
| | | | | KSFLAWYQQKPGQSPKLLIYWASTRESGVPDRFTG |
| | | | | SGSGTDFTLTISSVQAEDVAVYYCKQSYHLFTFGS |
| | | | | GTKLEIKRTVAAPSVFIFPPDIQMTQSPSSMSVSV |
| | | | | GDRVTITCHSSQDINSNIGWLQQKPGKSFKGLIYH |
| | | | | GTNLDDGVPSRFSGSGSGTDYTLTISSLQPEDFAT |
| | | | | YYCVQYAQFPWTFGGGTKLEIKR |

### Example 2.39

### Generation of EGFR (seq. 2) and PLGF DVD-Igs with Linker Set 3

TABLE 50

| | DVD | Outer | Inner | |
|---|---|---|---|---|
| SEQ | Variable | Variable | Variable | |
| ID | Domain | Domain | Domain | Sequence |
| NO | Name | Name | Name | 12345678901234567890123456789012345 |
| 211 | DVD813H | AB064VH | AB047VH | QVQLQESGPGLVKPSQTLSLTCTVSGYSISSDFAW |
| | | | | NWIRQPPGKGLEWMGYISYSGNTRYQPSLKSRITI |
| | | | | SRDTSKNQFFLKLNSVTAADTATYYCVTAGRGFPY |
| | | | | WGQGTLVTVSSASTKGPSVFPLAPQVQLQQSGAEL |
| | | | | VKPGASVKISCKASGYTFTDYYINWVKLAPGQGLE |
| | | | | WIGWIYPGSGNTKYNEKFKGKATLTIDTSSSTAYM |
| | | | | QLSSLTSEDTAVYFCVRDSPFFDYWGQGTLLTVSS |
| 212 | DVD813L | AB064VL | AB047VL | DIQMTQSPSSMSVSVGDRVTITCHSSQDINSNIGW |
| | | | | LQQKPGKSFKGLIYHGTNLDDGVPSRFSGSGSGTD |
| | | | | YTLTISSLQPEDFATYYCVQYAQFPWTFGGGTKLE |
| | | | | IKRTVAAPDIVLTQSPDSLAVSLGERVTMNCKSSQ |
| | | | | SLLNSGMRKSFLAWYQQKPGQSPKLLIYWASTRES |
| | | | | GVPDRFTGSGSGTDFTLTISSVQAEDVAVYYCKQS |
| | | | | YHLFTFGSGTKLEIKR |
| 213 | DVD814H | AB047VH | AB064VH | QVQLQQSGAELVKPGASVKISCKASGYTFTDYYIN |
| | | | | WVKLAPGQGLEWIGWIYPGSGNTKYNEKFKGKATL |
| | | | | TIDTSSSTAYMQLSSLTSEDTAVYFCVRDSPFFDY |
| | | | | WGQGTLLTVSSASTKGPSVFPLAPQVQLQESGEGL |
| | | | | VKPSQTLSLTCTVSGYSISSDFAWNWIRQPPGKGL |
| | | | | EWMGYISYSGNTRYQPSLKSRITISRDTSKNQFFL |
| | | | | KLNSVTAADTATYYCVTAGRGFPYWGQGTLVTVSS |
| 214 | DVD814L | AB047VL | AB064VL | DIVLTQSPDSLAVSLGERVTMNCKSSQSLLNSGMR |
| | | | | KSFLAWYQQKPGQSPKLLIYWASTRESGVPDRFTG |
| | | | | SGSGTDFTLTISSVQAEDVAVYYCKQSYHLFTFGS |
| | | | | GTKLEIKRTVAAPDIQMTQSPSSMSVSVGDRVTIT |
| | | | | CHSSQDINSNIGWLQQKPGKSFKGLIYHGTNLDDG |
| | | | | VPSRFSGSGSGTDYTLTISSLQPEDFATYYCVQYA |
| | | | | QFPWTFGGGTKLEIKR |

### Example 2.40

### Generation of EGFR (seq. 2) and PLGF DVD-IgS with Linker Set 4

TABLE 51

| | DVD | Outer | Inner | |
|---|---|---|---|---|
| SEQ | Variable | Variable | Variable | |
| ID | Domain | Domain | Domain | Sequence |
| NO | Name | Name | Name | 12345678901234567890123456789012345 |
| 215 | DVD843H | AB064VH | AB047VH | QVQLQESGPGLVKPSQTLSLTCTVSGYSISSDFAW |
| | | | | NWIRQPPGKGLEWMGYISYSGNTRYQPSLKSRITI |
| | | | | SRDTSKNQFFLKLNSVTAADTATYYCVTAGRGFPY |
| | | | | WGQGTLVTVSSASTKGPQVQLQQSGAELVKPGASV |
| | | | | KISCKASGYTFTDYYINWVKLAPGQGLEWIGWIYP |
| | | | | GSGNTKYNEKFKGKATLTIDTSSSTAYMQLSSLTS |
| | | | | EDTAVYFCVRDSPFFDYWGQGTLLTVSS |
| 216 | DVD843L | AB064VL | AB047VL | DIQMTQSPSSMSVSVGDRVTITCHSSQDINSNIGW |
| | | | | LQQKPGKSFKGLIYHGTNLDDGVPSRFSGSGSGTD |
| | | | | YTLTISSLQPEDFATYYCVQYAQFPWTFGGGTKLE |
| | | | | IKRTVAAPSVFIFPPDIVLTQSPDSLAVSLGERVT |
| | | | | MNCKSSQSLLNSGMRKSFLAWYQQKPGQSPKLLIY |
| | | | | WASTRESGVPDRFTGSGSGTDFTLTISSVQAEDVA |
| | | | | VYYCKQSYHLFTFGSGTKLEIKR |
| 217 | DVD844H | AB047VH | AB064VH | QVQLQQSGAELVKPGASVKISCKASGYTFTDYYIN |
| | | | | WVKLAPGQGLEWIGWIYPGSGNTKYNEKFKGKATL |
| | | | | TIDTSSSTAYMQLSSLTSEDTAVYFCVRDSPFFDY |
| | | | | WGQGTLLTVSSASTKGPQVQLQESGPGLVKPSQTL |
| | | | | SLTCTVSGYSISSDFAWNWIRQPPGKGLEWMGYIS |
| | | | | YSGNTRYQPSLKSRITISRDTSKNQFFLKLNSVTA |
| | | | | ADTATYYCVTAGRGFPYWGQGTLVTVSS |
| 218 | DVD844L | AB047VL | AB064VL | DIVLTQSPDSLAVSLGERVTMNCKSSQSLLNSGMR |
| | | | | KSFLAWYQQKPGQSPKLLIYWASTRESGVPDRFTG |
| | | | | SGSGTDFTLTISSVQAEDVAVYYCKQSYHLFTFGS |
| | | | | GTKLEIKRTVAAPSVFIFPPDIQMTQSPSSMSVSV |
| | | | | GDRVTITCHSSQDINSNIGWLQQKPGKSFKGLIYH |
| | | | | GTNLDDGVPSRFSGSGSGTDYTLTISSLQPEDFAT |
| | | | | YYCVQYAQFPWTFGGGTKLEIKR |

### Example 2.41

### Generation of EGFR (seq. 2) and ErbB3 (seq. 3) DVD-Igs with Linker Set 1

TABLE 52

| | DVD | Outer | Inner | |
|---|---|---|---|---|
| SEQ | Variable | Variable | Variable | |
| ID | Domain | Domain | Domain | Sequence |
| NO | Name | Name | Name | 12345678901234567890123456789012345 |
| 219 | DVD755H | AB064VH | AB067VH | QVQLQESGPGLVKPSQTLSLTCTVSGYSISSDFAW |
| | | | | NWIRQPPGKGLEWMGYISYSGNTRYQPSLKSRITI |
| | | | | SRDTSKNQFFLKLNSVTAADTATYYCVTAGRGFPY |
| | | | | WGQGTLVIVSSASTKGPEVQLLESGGGLVQPGGSL |
| | | | | RLSCAASGFTFSHYVMAWVRQAPGKGLEWVSSISS |
| | | | | SGGWTLYADSVKGRFTISRDNSKNTLYLQMNSLRA |
| | | | | EDTAVYYCTRGLKMATIFDYWGQGTLVTVSS |
| 220 | DVD755L | AB064VL | AB067VL | DIQMTQSPSSMSVSVGDRVTITCHSSQDINSNIGW |
| | | | | LQQKPGKSFKGLIYHGTNLDDGVPSRFSGSGSGTD |
| | | | | YTLTISSLQPEDFATYYCVQYAQFPWTFGGGTKLE |
| | | | | IKRTVAAPQSALTQPASVSGSPGQSITISCTGTSS |
| | | | | DVGSYNVVSWYQQHPGKAPKLIIYEVSQRPSGVSN |
| | | | | RFSGSKSGNTASLTISGLQTEDEADYYCCSYAGSS |
| | | | | IFVIFGGGTKVTVLG |
| 221 | DVD756H | AB067VH | AB064VH | EVQLLESGGGLVQPGGSLRLSCAASGFTFSHYVMA |
| | | | | WVRQAPGKGLEWVSSISSSGGWTLYADSVKGRFTI |
| | | | | SRDNSKNTLYLQMNSLRAEDTAVYYCTRGLKMATI |
| | | | | FDYWGQGTLVTVSSASTKGPQVQLQESGPGLVKPS |
| | | | | QTLSLTCTVSGYSISSDFAWNWIRQPPGKGLEWMG |
| | | | | YISYSGNTRYQPSLKSRITISRDTSKNQFFLKLNS |
| | | | | VTAADTATYYCVTAGRGFPYWGQGTLVTVSS |
| 222 | DVD756L | AB067VL | AB064VL | QSALTQPASVSGSPGQSITISCTGTSSDVGSYNVV |
| | | | | SWYQQHPGKAPKLIIYEVSQRPSGVSNRFSGSKSG |
| | | | | NTASLTISGLQTEDEADYYCCSYAGSSIFVIFGGG |
| | | | | TKVTVLGQPKAAPDIQMTQSPSSMSVSVGDRVTIT |
| | | | | CHSSQDINSNIGWLQQKPGKSFKGLIYHGTNLDDG |
| | | | | VPSRFSGSGSGTDYTLTISSLQPEDFATYYCVQYA |
| | | | | QFPWTFGGGTKLEIKR |

### Example 2.42

### Generation of EGFR (seq. 2) and ErbB3 (seq. 3) DVD-IgS with Linker Set 2

TABLE 53

| | DVD | Outer | Inner | |
|---|---|---|---|---|
| SEQ | Variable | Variable | Variable | |
| ID | Domain | Domain | Domain | Sequence |
| NO | Name | Name | Name | 12345678901234567890123456789012345 |
| 223 | DVD787H | AB064VH | AB067VH | QVQLQESGPGLVKPSQTLSLTCTVSGYSISSDFAW |
| | | | | NWIRQPPGKGLEWMGYISYSGNTRYQPSLKSRITI |
| | | | | SRDTSKNQFFLKLNSVTAADTATYYCVTAGRGFPY |
| | | | | WGQGTLVTVSSASTKGPSVFPLAPEVQLLESGGGL |
| | | | | VQPGGSLRLSCAASGFTFSHYVMAWVRQAPGKGLE |
| | | | | WVSSISSSGGWTLYADSVKGRFTISRDNSKNTLYL |
| | | | | QMNSLRAEDTAVYYCTRGLKMATIFDYWGQGTLVT |
| | | | | VSS |
| 224 | DVD787L | AB064VL | AB067VL | DIQMTQSPSSMSVSVGDRVTITCHSSQDINSNIGW |
| | | | | LQQKPGKSFKGLIYHGINLDDGVPSRFSGSGSGTD |
| | | | | YTLTISSLQPEDFATYYCVQYAQFPWTFGGGTKLE |
| | | | | IKRTVAAPSVFIFPPQSALTQPASVSGSPGQSITI |
| | | | | SCTGTSSDVGSYNVVSWYQQHPGKAPKLIIYEVSQ |
| | | | | RPSGVSNRFSGSKSGNTASLTISGLQTEDEADYYC |
| | | | | CSYAGSSIFVIFGGGTKVTVLG |
| 225 | DVD788H | AB067VH | AB064VH | EVQLLESGGGLVQPGGSLRLSCAASGFTFSHYVMA |
| | | | | WVRQAPGKGLEWVSSISSSGGWTLYADSVKGRFTI |
| | | | | SRDNSKNTLYLQMNSLRAEDTAVYYCTRGLKMATI |
| | | | | FDYWGQGTLVTVSSASTKGPSVFPLAPQVQLQESG |
| | | | | PGLVKPSQTLSLTCTVSGYSISSDFAWNWIRQPPG |
| | | | | KGLEWMGYISYSGNTRYQPSLKSRITISRDTSKNQ |
| | | | | FFLKLNSVTAADTATYYCVTAGRGFPYWGQGTLVT |
| | | | | VSS |
| 226 | DVD788L | AB067VL | AB064VL | QSALTQPASVSGSPGQSITISCTGTSSDVGSYNVV |
| | | | | SWYQQHPGKAPKLIIYEVSQRPSGVSNRFSGSKSG |
| | | | | NTASLTISGLQTEDEADYYCCSYAGSSIFVIFGGG |
| | | | | TKVAVLGQPKAAPSVTLFPPDIQMTQSPSSMSVSV |
| | | | | GDRVTITCHSSQDINSNIGWLQQKPGKSFKGLIYH |
| | | | | GTNLDDGVPSRFSGSGSGTDYTLTISSLQPEDFAT |
| | | | | YYCVQYAQFPWTFGGGTKLEIKR |

### Example 2.43

### Generation of EGFR (seq. 2) and ErbB3 (seq. 3) DVD-Igs with Linker Set 3

TABLE 54

| | DVD | Outer | Inner | |
|---|---|---|---|---|
| SEQ | Variable | Variable | Variable | |
| ID | Domain | Domain | Domain | Sequence |
| NO | Name | Name | Name | 12345678901234567890123456789012345 |
| 227 | DVD817H | AB064VH | AB067VH | QVQLQESGPGLVKPSQTLSLTCTVSGYSISSDFAW |
| | | | | NWIRQPPGKGLEWMGYISYSGNTRYQPSLKSRITI |
| | | | | SRDTSKNQFFLKLNSVTAADTATYYCVTAGRGFPY |
| | | | | WGQGTLVTVSSASTKGPSVFPLAPEVQLLESGGGL |
| | | | | VQPGGSLRLSCAASGFTFSHYVMAWVRQAPGKGLE |
| | | | | WVSSISSSGGWTLYADSVKGRFTISRDNSKNTLYL |
| | | | | QMNSLRAEDTAVYYCTRGLKMATIFDYWGQGTLVT |
| | | | | VSS |
| 228 | DVD817L | AB064VL | AB067VL | DIQMTQSPSSMSVSVGDRVTITCHSSQDINSNIGW |
| | | | | LQQKPGKSFKGLIYHGTNLDDGVPSRFSGSGSGTD |
| | | | | YTLTISSLQPEDFATYYCVQYAQFPWTFGGGTKLE |
| | | | | IKRTVAAPQSALTQPASVSGSPGQSITISCTGTSS |
| | | | | DVGSYNVVSWYQQHPGKAPKLIIYEVSQRPSGVSN |
| | | | | RFSGSKSGNTASLTISGLQTEDEADYYCCSYAGSS |
| | | | | IFVIFGGGTKVTVLG |
| 229 | DVD818H | AB067VH | AB064VH | EVQLLESGGGLVQPGGSLRLSCAASGFTFSHYVMA |
| | | | | WVRQAPGKGLEWVSSISSSGGWTLYADSVKGRFTI |
| | | | | SRDNSKNTLYLQMNSLRAEDTAVYYCTRGLKMATI |
| | | | | FDYWGQGTLVTVSSASTKGPSVFPLAPQVQLQESG |
| | | | | PGLVKPSQTLSLTCTVSGYSISSDFAWNWIRQPPG |
| | | | | KGLEWMGYISYSGNTRYQPSLKSRITISRDTSKNQ |
| | | | | FFLKLNSVTAADTATYYCVTAGRGFPYWGQGTLVT |
| | | | | VSS |
| 230 | DVD818L | AB067VL | AB064VL | QSALTQPASVSGSPGQSITISCTGTSSDVGSYNVV |
| | | | | SWYQQHPGKAPKLIIYEVSQRPSGVSNRFSGSKSG |
| | | | | NTASLTISGLQTEDEADYYCCSYAGSSIFVIFGGG |
| | | | | TKVTVLGQPKAAPDIQMTQSPSSMSVSVGDRVTIT |
| | | | | CHSSQDINSNIGWLQQKPGKSFKGLIYHGTNLDDG |
| | | | | VPSRFSGSGSGTDYTLTISSLQPEDFATYYCVQYA |
| | | | | QFPWTFGGGTKLEIKR |

### Example 2.44

### Generation of EGFR (seq. 2) and ErbB3 (seq. 3) DVD-IgS with Linker Set 4

TABLE 55

| | DVD | Outer | Inner | |
|---|---|---|---|---|
| SEQ | Variable | Variable | Variable | |
| ID | Domain | Domain | Domain | Sequence |
| NO | Name | Name | Name | 12345678901234567890123456789012345 |
| 231 | DVD847H | AB064VH | AB067VH | QVQLQESGPGLVKPSQTLSLTCTVSGYSISSDFAW |
| | | | | NWIRQPPGKGLEWMGYISYSGNTRYQPSLKSRITI |
| | | | | SRDTSKNQFFLKLNSVTAADTATYYCVTAGRGFPY |
| | | | | WGQGTLVTVSSASTKGPEVQLLESGGGLVQPGGSL |
| | | | | RLSCAASGFTFSHYVMAWVRQAPGKGLEWVSSISS |
| | | | | SGGWTLYADSVKGRFTISRDNSKNTLYLQMNSLRA |
| | | | | EDTAVYYCTRGLKMATIFDYWGQGTLVTVSS |
| 232 | DVD847L | AB064VL | AB067VL | DIQMTQSPSSMSVSVGDRVTITCHSSQDINSNIGW |
| | | | | LQQKPGKSFKGLIYHGTNLDDGVPSRFSGSGSGTD |
| | | | | YTLTISSLQPEDFATYYCVQYAQFPWTFGGGTKLE |
| | | | | IKRTVAAPSVFIFPPQSALTQPASVSGSPGQSITI |
| | | | | SCTGTSSDVGSYNVVSWYQQHPGKAPKLIIYEVSQ |
| | | | | RPSGVSNRFSGSKSGNTASLTISGLQTEDEADYYC |
| | | | | CSYAGSSIFVIFGGGTKVTVLG |
| 233 | DVD848H | AB067VH | AB064VH | EVQLLESGGGLVQPGGSLRLSCAASGFTFSHYVMA |
| | | | | WVRQAPGKGLEWVSSISSSGGWTLYADSVKGRFTI |
| | | | | SRDNSKNTLYLQMNSLRAEDTAVYYCTRGLKMATI |
| | | | | FDYWGQGTLVTVSSASTKGPQVQLQESGPGLVKPS |
| | | | | QTLSLTCTVSGYSISSDFAWNWIRQPPGKGLEWMG |
| | | | | YISYSGNTRYQPSLKSRITISRDTSKNQFFLKLNS |
| | | | | VTAADTATYYCVTAGRGFPYWGQGTLVTVSS |
| 234 | DVD848L | AB067VL | AB064VL | QSALTQPASVSGSPGQSITISCTGTSSDVGSYNVV |
| | | | | SWYQQHPGKAPKLIIYEVSQRPSGVSNRFSGSKSG |
| | | | | NTASLTISGLQTEDEADYYCCSYAGSSIFVIFGGG |
| | | | | TKVTVLGQPKAAPSVTLFPPDIQMTQSPSSMSVSV |
| | | | | GDRVTITCHSSQDINSNIGWLQQKPGKSFKGLIYH |
| | | | | GTNLDDGVPSRFSGSGSGTDYTLTISSLQPEDFAT |
| | | | | YYCVQYAQFPWTFGGGTKLEIKR |

### Example 2.45

### Generation of EGFR (seq. 2) and VEGF (seq. 2) DVD-IgS with Linker Set 1

TABLE 56

| | DVD | Outer | Inner | |
|---|---|---|---|---|
| SEQ | Variable | Variable | Variable | |
| ID | Domain | Domain | Domain | Sequence |
| NO | Name | Name | Name | 12345678901234567890123456789012345 |
| 235 | DVD757H | AB064VH | AB070VH | QVQLQESGPGLVKPSQTLSLTCTVSGYSISSDFAW |
| | | | | NWIRQPPGKGLEWMGYISYSGNTRYQPSLKSRITI |
| | | | | SRDTSKNQFFLKLNSVTAADTATYYCVTAGRGFPY |
| | | | | WGQGTLVTVSSASTKGPEVQLVESGGGLVQPGGSL |
| | | | | RLSCAASGFTISDYWIHWVRQAPGKGLEWVAGITP |
| | | | | AGGYTYYADSVKGRFTISADTSKNTAYLQMNSLRA |
| | | | | EDTAVYYCARFVFFLPYAMDYWGQGTLVTVSS |
| 236 | DVD757L | AB064VL | AB070VL | DIQMTQSPSSMSVSVGDRVTITCHSSQDINSNIGW |
| | | | | LQQKPGKSFKGLIYHGTNLDDGVPSRFSGSGSGTD |
| | | | | YTLTISSLQPEDFATYYCVQYAQFPWTFGGGTKLE |
| | | | | IKRTVAAPDIQMTQSPSSLSASVGDRVTITCRASQ |
| | | | | DVSTAVAWYQQKPGKAPKLLIYSASFLYSGVPSRF |
| | | | | SGSGSGTDFTLTISSLQPEDFATYYCQQSYTTPPT |
| | | | | FGQGTKVEIKR |
| 237 | DVD758H | AB070VH | AB064VH | EVQLVESGGGLVQPGGSLRLSCAASGFTISDYWIH |
| | | | | WVRQAPGKGLEWVAGITPAGGYTYYADSVKGRFTI |
| | | | | SADTSKNTAYLQMNSLRAEDTAVYYCARFVFFLPY |
| | | | | AMDYWGQGTLVTVSSASTKGPQVQLQESGPGLVKP |
| | | | | SQTLSLTCTVSGYSISSDFAWNWIRQPPGKGLEWM |
| | | | | GYISYSGNTRYQPSLKSRITISRDTSKNQFFLKLN |
| | | | | SVTAADTATYYCVTAGRGFPYWGQGTLVTVSS |
| 238 | DVD758L | AB070VL | AB064VL | DIQMTQSPSSLSASVGDRVTITCRASQDVSTAVAW |
| | | | | YQQKPGKAPKLLIYSASFLYSGVPSRFSGSGSGTD |
| | | | | FTLTISSLQPEDFATYYCQQSYTTPPTFGQGTKVE |
| | | | | IKRTVAAPDIQMTQSPSSMSVSVGDRVTITCHSSQ |
| | | | | DINSNIGWLQQKPGKSFKGLIYHGTNLDDGVPSRF |
| | | | | SGSGSGTDYTLTISSLQPEDFATYYCVQYAQFPWT |
| | | | | FGGGTKLEIKR |

### Example 2.46

### Generation of EGFR (seq. 2) and VEGF (seq. 2) DVD-IgS with Linker Set 2

TABLE 57

| | DVD | Outer | Inner | |
|---|---|---|---|---|
| SEQ | Variable | Variable | Variable | |
| ID | Domain | Domain | Domain | Sequence |
| NO | Name | Name | Name | 12345678901234567890123456789012345 |
| 239 | DVD789H | AB064VH | AB070VH | QVQLQESGPGLVKPSQTLSLTCTVSGYSISSDFAW |
| | | | | NWIRQPPGKGLEWMGYISYSGNTRYQPSLKSRITI |
| | | | | SRDTSKNQFFLKLNSVTAADTATYYCVTAGRGFPY |
| | | | | WGQGTLVTVSSASTKGPSVFPLAPEVQLVESGGGL |
| | | | | VQPGGSLRLSCAASGFTISDYWIHWVRQAPGKGLE |
| | | | | WVAGITPAGGYTYYADSVKGRFTISADTSKNTAYL |
| | | | | QMNSLRAEDTAVYYCARFVFFLPYAMDYWGQGTLV |
| | | | | TVSS |
| 240 | DVD789L | AB064VL | AB070VL | DIQMTQSPSSMSVSVGDRVTITCHSSQDINSNIGW |
| | | | | LQQKPGKSFKGLIYHGTNLDDGVPSRFSGSGSGTD |
| | | | | YTLTISSLQPEDFATYYCVQYAQFPWTFGGGTKLE |
| | | | | IKRTVAAPSVFIFPPDIQMTQSPSSLSASVGDRVT |
| | | | | ITCRASQDVSTAVAWYQQKPGKAPKLLIYSASFLY |
| | | | | SGVPSRFSGSGSGTDFTLTISSLQPEDFATYYCQQ |
| | | | | SYTTPPTFGQGTKVEIKR |
| 241 | DVD790H | AB070VH | AB064VH | EVQLVESGGGLVQPGGSLRLSCAASGFTISDYWIH |
| | | | | WVRQAPGKGLEWVAGITPAGGYTYYADSVKGRFTI |
| | | | | SADTSKNTAYLQMNSLRAEDTAVYYCARFVFFLPY |
| | | | | AMDYWGQGTLVTVSSASTKGPSVFPLAPQVQLQES |
| | | | | GPGLVKPSQTLSLTCTVSGYSISSDFAWNWIRQPP |
| | | | | GKGLEWMGYISYSGNTRYQPSLKSRITISRDTSKN |
| | | | | QFFLKLNSVTAADTATYYCVTAGRGFPYWGQGTLV |
| | | | | TVSS |
| 242 | DVD790L | AB070VL | AB064VL | DIQMTQSPSSLSASVGDRVTITCRASQDVSTAVAW |
| | | | | YQQKPGKAPKLLIYSASFLYSGVPSRFSGSGSGTD |
| | | | | FTLTISSLQPEDFATYYCQQSYTTPPTFGQGTKVE |
| | | | | IKRTVAAPSVFIFPPDIQMTQSPSSMSVSVGDRVT |
| | | | | ITCHSSQDINSNIGWLQQKPGKSFKGLIYHGTNLD |
| | | | | DGVPSRFSGSGSGTDYTLTISSLQPEDFATYYCVQ |
| | | | | YAQFPWTFGGGTKLEIKR |

### Example 2.47

### Generation of EGFR (seq. 2) and VEGF (seq. 2) DVD-Igs with Linker Set 3

TABLE 58

| | DVD | Outer | Inner | |
|---|---|---|---|---|
| SEQ | Variable | Variable | Variable | |
| ID | Domain | Domain | Domain | Sequence |
| NO | Name | Name | Name | 12345678901234567890123456789012345 |
| 243 | DVD819H | AB064VH | AB070VH | QVQLQESGPGLVKPSQTLSLTCTVSGYSISSDFAW |
| | | | | NWIRQPPGKGLEWMGYISYSGNTRYQPSLKSRITI |
| | | | | SRDTSKNQFFLKLNSVTAADTATYYCVTAGRGFPY |
| | | | | WGQGTLVTVSSASTKGPSVFPLAPEVQLVESGGGL |
| | | | | VQPGGSLRLSCAASGFTISDYWIHWVRQAPGKGLE |
| | | | | WVAGITPAGGYTYYADSVKGRFTISADTSKNTAYL |
| | | | | QMNSLRAEDTAVYYCARFVFFLPYAMDYWGQGTLV |
| | | | | TVSS |
| 244 | DVD819L | AB064VL | AB070VL | DIQMTQSPSSMSVSVGDRVTITCHSSQDINSNIGW |
| | | | | LQQKPGKSFKGLIYHGTNLDDGVPSRFSGSGSGTD |
| | | | | YTLTISSLQPEDFATYYCVQYAQFPWTFGGGTKLE |
| | | | | IKRTVAAPDIQMTQSPSSLSASVGDRVTITCRASQ |
| | | | | DVSTAVAWYQQKPGKAPKLLIYSASFLYSGVPSRF |
| | | | | SGSGSGTDFTLTISSLQPEDFATYYCQQSYTTPPT |
| | | | | FGQGTKVEIKR |
| 245 | DVD820H | AB070VH | AB064VH | EVQLVESGGGLVQPGGSLRLSCAASGFTISDYWIH |
| | | | | WVRQAPGKGLEWVAGITPAGGYTYYADSVKGRFTI |
| | | | | SADTSKNTAYLQMNSLRAEDTAVYYCARFVFFLPY |
| | | | | AMDYWGQGTLVTVSSASTKGPSVFPLAPQVQLQES |
| | | | | GPGLVKPSQTLSLTCTVSGYSISSDFAWNWIRQPP |
| | | | | GKGLEWMGYISYSGNTRYQPSLKSRITISRDTSKN |
| | | | | QFFLKLNSVTAADTATYYCVTAGRGFPYWGQGTLV |
| | | | | TVSS |
| 246 | DVD820L | AB070VL | AB064VL | DIQMTQSPSSLSASVGDRVTITCRASQDVSTAVAW |
| | | | | YQQKPGKAPKLLIYSASFLYSGVPSRFSGSGSGTD |
| | | | | FTLTISSLQPEDFATYYCQQSYTTPPTFGQGTKVE |
| | | | | IKRTVAAPDIQMTQSPSSMSVSVGDRVTITCHSSQ |
| | | | | DINSNIGWLQQKPGKSFKGLIYHGTNLDDGVPSRF |
| | | | | SGSGSGTDYTLTISSLQPEDFATYYCVQYAQFPWT |
| | | | | FGGGTKLEIKR |

### Example 2.48

### Generation of EGFR (seq. 2) and VEGF (seq. 2) DVD-IgS with Linker Set 4

TABLE 59

| | DVD | Outer | Inner | |
|---|---|---|---|---|
| SEQ | Variable | Variable | Variable | |
| ID | Domain | Domain | Domain | Sequence |
| NO | Name | Name | Name | 12345678901234567890123456789012345 |
| 247 | DVD849H | AB064VH | AB070VH | QVQLQESGPGLVKPSQTLSLTCTVSGYSISSDFAW |
| | | | | NWIRQPPGKGLEWMGYISYSGNTRYQPSLKSRITI |
| | | | | SRDTSKNQFFLKLNSVTAADTATYYCVTAGRGFPY |
| | | | | WGQGTLVTVSSASTKGPEVQLVESGGGLVQPGGSL |
| | | | | RLSCAASGFTISDYWIHWVRQAPGKGLEWVAGITP |
| | | | | AGGYTYYADSVKGRFTISADTSKNTAYLQMNSLRA |
| | | | | EDTAVYYCARFVFFLPYAMDYWGQGTLVTVSS |
| 248 | DVD849L | AB064VL | AB070VL | DIQMTQSPSSMSVSVGDRVTITCHSSQDINSNIGW |
| | | | | LQQKPGKSFKGLIYHGTNLDDGVPSRFSGSGSGTD |
| | | | | YTLTISSLQPEDFATYYCVQYAQFPWTFGGGTKLE |
| | | | | IKRTVAAPSVFIFPPDIQMTQSPSSLSASVGDRVT |
| | | | | ITCRASQDVSTAVAWYQQKPGKAPKLLIYSASFLY |
| | | | | SGVPSRFSGSGSGTDFTLTISSLQPEDFATYYCQQ |
| | | | | SYTTPPTFGQGTKVEIKR |
| 249 | DVD850H | AB070VH | AB064VH | EVQLVESGGGLVQPGGSLRLSCAASGFTISDYWIH |
| | | | | WVRQAPGKGLEWVAGITPAGGYTYYADSVKGRFTI |
| | | | | SADTSKNTAYLQMNSLRAEDTAVYYCARFVFFLPY |
| | | | | AMDYWGQGTLVTVSSASTKGPQVQLQESGPGLVKP |
| | | | | SQTLSLTCTVSGYSISSDFAWNWIRQPPGKGLEWM |
| | | | | GYISYSGNTRYQPSLKSRITISRDTSKNQFFLKLN |
| | | | | SVTAADTATYYCVTAGRGFPYWGQGTLVTVSS |
| 250 | DVD850L | AB070VL | AB064VL | DIQMTQSPSSLSASVGDRVTITCRASQDVSTAVAW |
| | | | | YQQKPGKAPKLLIYSASFLYSGVPSRFSGSGSGTD |
| | | | | FTLTISSLQPEDFATYYCQQSYTTPPTFGQGTKVE |
| | | | | IKRTVAAPSVFIFPPDIQMTQSPSSMSVSVGDRVT |
| | | | | ITCHSSQDINSNIGWLQQKPGKSFKGLIYHGTNLD |
| | | | | DGVPSRFSGSGSGTDYTLTISSLQPEDFATYYCVQ |
| | | | | YAQFPWTFGGGTKLEIKR |

### Example 2.49

### Generation of EGFR (seq. 2) and VEGF (seq. 3) DVD-IgS with Linker Set 1

TABLE 60

| | DVD | Outer | Inner | |
|---|---|---|---|---|
| SEQ | Variable | Variable | Variable | |
| ID | Domain | Domain | Domain | Sequence |
| NO | Name | Name | Name | 12345678901234567890123456789012345 |
| 251 | DVD759H | AB064VH | AB071VH | QVQLQESGPGLVKPSQTLSLTCTVSGYSISSDFAW |
| | | | | NWIRQPPGKGLEWMGYISYSGNTRYQPSLKSRITI |
| | | | | SRDTSKNQFFLKLNSVTAADTATYYCVTAGRGFPY |
| | | | | WGQGTLVTVSSASTKGPEVQLVESGGGLVQPGGSL |
| | | | | RLSCAASGFTINASWIHWVRQAPGKGLEWVGAIYP |
| | | | | YSGYTNYADSVKGRFTISADTSKNTAYLQMNSLRA |
| | | | | EDTAVYYCARWGHSTSPWAMDYWGQGTLVTVSS |
| 252 | DVD759L | AB064VL | AB071VL | DIQMTQSPSSMSVSVGDRVTITCHSSQDINSNIGW |
| | | | | LQQKPGKSFKGLIYHGTNLDDGVPSRFSGSGSGTD |
| | | | | YTLTISSLQPEDFATYYCVQYAQFPWTFGGGTKLE |
| | | | | IKRTVAAPDIQMTQSPSSLSASVGDRVTITCRASQ |
| | | | | VIRRSLAWYQQKPGKAPKLLIYAASNLASGVPSRF |
| | | | | SGSGSGTDFTLTISSLQPEDFATYYCQQSNTSPLT |
| | | | | FGQGTKVEIKR |
| 253 | DVD760H | AB071VH | AB064VH | EVQLVESGGGLVQPGGSLRLSCAASGFTINASWIH |
| | | | | WVRQAPGKGLEWVGAIYPYSGYTNYADSVKGRFTI |
| | | | | SADTSKNTAYLQMNSLRAEDTAVYYCARWGHSTSP |
| | | | | WAMDYWGQGTLVTVSSASTKGPQVQLQESGPGLVK |
| | | | | PSQTLSLTCTVSGYSISSDFAWNWIRQPPGKGLEW |
| | | | | MGYISYSGNTRYQPSLKSRITISRDTSKNQFFLKL |
| | | | | NSVTAADTATYYCVTAGRGFPYWGQGTLVTVSS |
| 254 | DVD760L | AB071VL | AB064VL | DIQMTQSPSSLSASVGDRVTITCRASQVIRRSLAW |
| | | | | YQQKPGKAPKLLIYAASNLASGVPSRFSGSGSGTD |
| | | | | FTLTISSLQPEDFATYYCQQSNTSPLTFGQGTKVE |
| | | | | IKRTVAAPDIQMTQSPSSMSVSVGDRVTITCHSSQ |
| | | | | DINSNIGWLQQKPGKSFKGLIYHGTNLDDGVPSRF |
| | | | | SGSGSGTDYTLTISSLQPEDFATYYCVQYAQFPWT |
| | | | | FGGGTKLEIKR |

### Example 2.50

### Generation of EGFR (seq. 2) and VEGF (seq. 3) DVD-IgS with Linker Set 2

TABLE 61

| | DVD | Outer | Inner | |
|---|---|---|---|---|
| SEQ | Variable | Variable | Variable | |
| ID | Domain | Domain | Domain | Sequence |
| NO | Name | Name | Name | 12345678901234567890123456789012345 |
| 255 | DVD791H | AB064VH | AB071VH | QVQLQESGPGLVKPSQTLSLTCTVSGYSISSDFAW |
| | | | | NWIRQPPGKGLEWMGYISYSGNTRYQPSLKSRITI |
| | | | | SRDTSKNQFFLKLNSVTAADTATYYCVTAGRGFPY |
| | | | | WGQGTLVTVSSASTKGPSVFPLAPEVQLVESGGGL |
| | | | | VQPGGSLRLSCAASGFTINASWIHWVRQAPGKGLE |
| | | | | WVGAIYPYSGYTNYADSVKGRFTISADTSKNTAYL |
| | | | | QMNSLRAEDTAVYYCARWGHSTSPWAMDYWGQGTL |
| | | | | VTVSS |
| 256 | DVD791L | AB064VL | AB071VL | DIQMTQSPSSMSVSVGDRVTITCHSSQDINSNIGW |
| | | | | LQQKPGKSFKGLIYHGTNLDDGVPSRFSGSGSGTD |
| | | | | YTLTISSLQPEDFATYYCVQYAQFPWTFGGGTKLE |
| | | | | IKRTVAAPSVFIFPPDIQMTQSPSSLSASVGDRVT |
| | | | | ITCRASQVIRRSLAWYQQKPGKAPKLLIYAASNLA |
| | | | | SGVPSRFSGSGSGTDFTLTISSLQPEDFATYYCQQ |
| | | | | SNTSPLTFGQGTKVEIKR |
| 257 | DVD792H | AB071VH | AB064VH | EVQLVESGGGLVQPGGSLRLSCAASGFTINASWIH |
| | | | | WVRQAPGKGLEWVGAIYPYSGYTNYADSVKGRFTI |
| | | | | SADTSKNTAYLQMNSLRAEDTAVYYCARWGHSTSP |
| | | | | WAMDYWGQGTLVTVSSASTKGPSVFPLAPQVQLQE |
| | | | | SGPGLVKPSQTLSLTCTVSGYSISSDFAWNWIRQP |
| | | | | PGKGLEWMGYISYSGNTRYQPSLKSRITISRDTSK |
| | | | | NQFFLKLNSVTAADTATYYCVTAGRGFPYWGQGTL |
| | | | | VTVSS |
| 258 | DVD792L | AB071VL | AB064VL | DIQMTQSPSSLSASVGDRVTITCRASQVIRRSLAW |
| | | | | YQQKPGKAPKLLIYAASNLASGVPSRFSGSGSGTD |
| | | | | FTLTISSLQPEDFATYYCQQSNTSPLTFGQGTKVE |
| | | | | IKRTVAAPSVFIFPPDIQMTQSPSSMSVSVGDRVT |
| | | | | ITCHSSQDINSNIGWLQQKPGKSFKGLIYHGTNLD |
| | | | | DGVPSRFSGSGSGTDYTLTISSLQPEDFATYYCVQ |
| | | | | YAQFPWTFGGGTKLEIKR |

### Example 2.51

### Generation of EGFR (seq. 2) and VEGF (seq. 3) DVD-Igs with Linker Set 3

TABLE 62

| | DVD | Outer | Inner | |
|---|---|---|---|---|
| SEQ | Variable | Variable | Variable | |
| ID | Domain | Domain | Domain | Sequence |
| NO | Name | Name | Name | 12345678901234567890123456789012345 |
| 259 | DVD821H | AB064VH | AB071VH | QVQLQESGPGLVKPSQTLSLTCTVSGYSISSDFAW |
| | | | | NWIRQPPGKGLEWMGYISYSGNTRYQPSLKSRITI |
| | | | | SRDTSKNQFFLKLNSVTAADTATYYCVTAGRGFPY |
| | | | | WGQGTLVTVSSASTKGPSVFPLAPEVQLVESGGGL |
| | | | | VQPGGSLRLSCAASGFTINASWIHWVRQAPGKGLE |
| | | | | WVGAIYPYSGYTNYADSVKGRFTISADTSKNTAYL |
| | | | | QMNSLRAEDTAVYYCARWGHSTSPWAMDYWGQGTL |
| | | | | VTVSS |
| 260 | DVD821L | AB064VL | AB071VL | DIQMTQSPSSMSVSVGDRVTITCHSSQDINSNIGW |
| | | | | LQQKPGKSFKGLIYHGTNLDDGVPSRFSGSGSGTD |
| | | | | YTLTISSLQPEDFATYYCVQYAQFPWTFGGGTKLE |
| | | | | IKRTVAAPDIQMTQSPSSLSASVGDRVTITCRASQ |
| | | | | VIRRSLAWYQQKPGKAPKLLIYAASNLASGVPSRF |
| | | | | SGSGSGTDFTLTISSLQPEDFATYYCQQSNTSPLT |
| | | | | FGQGTKVEIKR |
| 261 | DVD822H | AB071VH | AB064VH | EVQLVESGGGLVQPGGSLRLSCAASGFTINASWIH |
| | | | | WVRQAPGKGLEWVGAIYPYSGYTNYADSVKGRFTI |
| | | | | SADTSKNTAYLQMNSLRAEDTAVYYCARWGHSTSP |
| | | | | WAMDYWGQGTLVTVSSASTKGPSVFPLAPQVQLQE |
| | | | | SGPGLVKPSQTLSLTCTVSGYSISSDFAWNWIRQP |
| | | | | PGKGLEWMGYISYSGNTRYQPSLKSRITISRDTSK |
| | | | | NQFFLKLNSVTAADTATYYCVTAGRGFPYWGQGTL |
| | | | | VTVSS |
| 262 | DVD822L | AB071VL | AB064VL | DIQMTQSPSSLSASVGDRVTITCRASQVIRRSLAW |
| | | | | YQQKPGKAPKLLIYAASNLASGVPSRFSGSGSGTD |
| | | | | FTLTISSLQPEDFATYYCQQSNTSPLTFGQGTKVE |
| | | | | IKRTVAAPDIQMTQSPSSMSVSVGDRVTITCHSSQ |
| | | | | DINSNIGWLQQKPGKSFKGLIYHGTNLDDGVPSRF |
| | | | | SGSGSGTDYTLTISSLQPEDFATYYCVQYAQFPWT |
| | | | | FGGGTKLEIKR |

### Example 2.52

### Generation of EGFR (seq. 2) and VEGF (seq. 3) DVD-Igs with Linker Set 4

TABLE 63

| | DVD | Outer | Inner | |
|---|---|---|---|---|
| SEQ | Variable | Variable | Variable | |
| ID | Domain | Domain | Domain | Sequence |
| NO | Name | Name | Name | 12345678901234567890123456789012345 |
| 263 | DVD851H | AB064VH | AB071VH | QVQLQESGPGLVKPSQTLSLTCTVSGYSISSDFAW |
| | | | | NWIRQPPGKGLEWMGYISYSGNTRYQPSLKSRITI |
| | | | | SRDTSKNQFFLKLNSVTAADTATYYCVTAGRGFPY |
| | | | | WGQGTLVTVSSASTKGPEVQLVESGGGLVQPGGSL |
| | | | | RLSCAASGFTINASWIHWVRQAPGKGLEWVGAIYP |
| | | | | YSGYTNYADSVKGRFTISADTSKNTAYLQMNSLRA |
| | | | | EDTAVYYCARWGHSTSPWAMDYWGQGTLVTVSS |
| 264 | DVD851L | AB064VL | AB071VL | DIQMTQSPSSMSVSVGDRVTITCHSSQPINSNIGW |
| | | | | LQQKPGKSFKGLIYHGTNLDDGVPSRFSGSGSGTD |
| | | | | YTLTISSLQPEDFATYYCVQYAQFPWTFGGGTKLE |
| | | | | IKRTVAAPSVFIFPPDIQMTQSPSSLSASVGDRVT |
| | | | | ITCRASQVIRRSLAWYQQKPGKAPKLLIYAASNLA |
| | | | | SGVPSRFSGSGSGTDFTLTISSLQPEDFATYYCQQ |
| | | | | SNTSPLTFGQGTKVEIKR |
| 265 | DVD852H | AB071VH | AB064VH | EVQLVESGGGLVQPGGSLRLSCAASGFTINASWIH |
| | | | | WVRQAPGKGLEWVGAIYPYSGYTNYADSVKGRFTI |
| | | | | SADTSKNTAYLQMNSLRAEDTAVYYCARWGHSTSP |
| | | | | WAMDYWGQGTLVTVSSASTKGPQVQLQESGPGLVK |
| | | | | PSQTLSLTCTVSGYSISSDFAWNWIRQPPGKGLEW |
| | | | | MGYISYSGNTRYQPSLKSRITISRDTSKNQFFLKL |
| | | | | NSVTAADTATYYCVTAGRGFPYWGQGTLVTVSS |
| 266 | DVD852L | AB071VL | AB064VL | DIQMTQSPSSLSASVGDRVTITCRASQVIRRSLAW |
| | | | | YQQKPGKAPKLLIYAASNLASGVPSRFSGSGSGTD |
| | | | | FTLTISSLQPEDFATYYCQQSNTSPLTFGQGTKVE |
| | | | | IKRTVAAPSVFIFPPDIQMTQSPSSMSVSVGDRVT |
| | | | | ITCHSSQDINSNIGWLQQKPGKSFKGLIYHGTNLD |
| | | | | DGVPSRFSGSGSGTDYTLTISSLQPEDFATYYCVQ |
| | | | | YAQFPWTFGGGTKLEIKR |

### Example 2.53

### Generation of EGFR (seq. 1) and RGMa DVD-Igs with Linker Set 1

TABLE 64

| | DVD | Outer | Inner | |
|---|---|---|---|---|
| SEQ | Variable | Variable | Variable | |
| ID | Domain | Domain | Domain | Sequence |
| NO | Name | Name | Name | 12345678901234567890123456789012345 |
| 267 | DVD713H | AB033VH | AB059VH | QVQLKQSGPGLVQPSQSLSITCTVSGESLTNYGVH |
| | | | | WVRQSPGKGLEWLGVIWSGGNTDYNTPFTSRLSIN |
| | | | | KDNSKSQVFFKMNSLQSNDTAIYYCARALTYYDYE |
| | | | | FAYWGQGTLVTVSAASTKGPEVQLVESGGGLVQPG |
| | | | | SSLKLSCVASGFTFSNYGMNWIRQAPKKGLEWIGM |
| | | | | IYYDSSEKHYADSVKGRFTISRDNSKNTLYLEMNS |
| | | | | LRSEDTAIYYCAKGTTPDYWGQGVMVTVSS |
| 268 | DVD713L | AB033VL | AB059VL | DILLTQSPVILSVSPGERVSFSCRASQSIGTNIHW |
| | | | | YQQRTNGSPRLLIKYASESISGIPSRFSGSGSGTD |
| | | | | FTLSINSVESEDIADYYCQQNNNWPTTFGAGTKLE |
| | | | | LKRTVAAPDVVLTQTPVSLSVTLGDQASMSCRSSQ |
| | | | | SLEYSDGYTFLEWFLQKPGQSPQLLIYEVSNRFSG |
| | | | | VPDRFIGSGSGTDFTLKISRVEPEDLGVYYCFQAT |
| | | | | HDPLTFGSGTKLEIKR |
| 269 | DVD714H | AB059VH | AB033VH | EVQLVESGGGLVQPGSSLKLSCVASGFTFSNYGMN |
| | | | | WIRQAPKKGLEWIGMIYYDSSEKHYADSVKGRFTI |
| | | | | SRDNSKNTLYLEMNSLRSEDTAIYYCAKGTTPDYW |
| | | | | GQGVMVTVSSASTKGPQVQLKQSGPGLVQPSQSLS |
| | | | | ITCTVSGFSLTNYGVHWVRQSPGKGLEWLGVIWSG |
| | | | | GNTDYNTPFTSRLSINKDNSKSQVFFKMNSLQSND |
| | | | | TAIYYCARALTYYDYEFAYWGQGTLVTVSA |
| 270 | DVD714L | AB059VL | AB033VL | DVVLTQTPVSLSVTLGDQASMSCRSSQSLEYSDGY |
| | | | | TFLEWFLQKPGQSPQLLIYEVSNRFSGVPDRFIGS |
| | | | | GSGTDFTLKISRVEPEDLGVYYCFQATHDPLTFGS |
| | | | | GTKLEIKRTVAAPDILLTQSPVILSVSPGERVSFS |
| | | | | CRASQSIGTNIHWYQQRTNGSPRLLIKYASESISG |
| | | | | IPSRFSGSGSGTDFTLSINSVESEDIADYYCQQNN |
| | | | | NWPTTFGAGTKLELKR |

### Example 2.54

### Generation of EGFR (seq. 1) and RGMa DVD-IgS with Linker Set 2

TABLE 65

| | DVD | Outer | Inner | |
|---|---|---|---|---|
| SEQ | Variable | Variable | Variable | |
| ID | Domain | Domain | Domain | Sequence |
| NO | Name | Name | Name | 12345678901234567890123456789012345 |
| 271 | DVD871H | AB033VH | AB059VH | QVQLKQSGPGLVQPSQSLSITCTVSGFSLTNYGVH |
| | | | | WVRQSPGKGLEWLGVIWSGGNTDYNTPFTSRLSIN |
| | | | | KDNSKSQVFFKMNSLQSNDTAIYYCARALTYYDYE |
| | | | | FAYWGQGTLVTVSAASTKGPSVFPLAPEVQLVESG |
| | | | | GGLVQPGSSLKLSCVASGFTFSNYGMNWIRQAPKK |
| | | | | GLEWIGMIYYDSSEKHYADSVKGRFTISRDNSKNT |
| | | | | LYLEMNSLRSEDTAIYYCAKGTTPDYWGQGVMVTV |
| | | | | SS |
| 272 | DVD871L | AB033VL | AB059VL | DILLTQSPVILSVSPGERVSFSCRASQSIGTNIHW |
| | | | | YQQRTNGSPRLLIKYASESISGIPSRFSGSGSGTD |
| | | | | FTLSINSVESEDIADYYCQQNNNWPTTFGAGTKLE |
| | | | | LKRTVAAPSVFIFPPDVVLTQTPVSLSVTLGDQAS |
| | | | | MSCRSSQSLEYSDGYTFLEWFLQKPGQSPQLLIYE |
| | | | | VSNRFSGVPDRFIGSGSGTDFTLKISRVEPEDLGV |
| | | | | YYCFQATHDPLTFGSGTKLEIKR |
| 273 | DVD872H | AB059VH | AB033VH | EVQLVESGGGLVQPGSSLKLSCVASGFTFSNYGMN |
| | | | | WIRQAPKKGLEWIGMIYYDSSEKHYADSVKGRFTI |
| | | | | SRDNSKNTLYLEMNSLRSEDTAIYYCAKGTTPDYW |
| | | | | GQGVMVTVSSASTKGPSVFPLAPQVQLKQSGPGLV |
| | | | | QPSQSLSITCTVSGFSLTNYGVHWVRQSPGKGLEW |
| | | | | LGVIWSGGNTDYNTPFTSRLSINKDNSKSQVFFKM |
| | | | | NSLQSNDTAIYYCARALTYYDYEFAYWGQGTLVTV |
| | | | | SA |
| 274 | DVD872L | AB059VL | AB033VL | DVVLTQTPVSLSVTLGDQASMSCRSSQSLEYSDGY |
| | | | | TFLEWFLQKPGQSPQLLIYEVSNRFSGVPDRFIGS |
| | | | | GSGTDFTLKISRVEPEDLGVYYCFQATHDPLTFGS |
| | | | | GTKLEIKRTVAAPSVFIFPPDILLTQSPVILSVSP |
| | | | | GERVSFSCRASQSIGTNIHWYQQRRNGSPRLLIKY |
| | | | | ASESISGIPSRFSGSGSGTDFTLSINSVESEDIAD |
| | | | | YYCQQNNNWPTTFGAGTKLELKR |

### Example 2.55

### Generation of EGFR (seq. 1) and RGMa DVD-Igs with Linker Set 3

TABLE 66

| | DVD | Outer | Inner | |
|---|---|---|---|---|
| SEQ | Variable | Variable | Variable | |
| ID | Domain | Domain | Domain | Sequence |
| NO | Name | Name | Name | 12345678901234567890123456789012345 |
| 275 | DVD877H | AB033VH | AB059VH | QVQLKQSGPGLVQPSQSLSITCTVSGFSLTNYGVH |
| | | | | WVRQSPGKGLEWLGVIWSGGNTDYNTPFTSRLSIN |
| | | | | KDNSKSQVFFKMNSLQSNDTAIYYCARALTYYDYE |
| | | | | FAYWGQGTLVTVSAASTKGPSVFPLAPEVQLVESG |
| | | | | GGLVQPGSSLKLSCVASGFTFSNYGMNWIRQAPKK |
| | | | | GLEWIGMIYYDSSEKHYADSVKGRFTISRDNSKNT |
| | | | | LYLEMNSLRSEDTAIYYCAKGTTPDYWGQGVMVTV |
| | | | | SS |
| 276 | DVD877L | AV033VL | AB059VL | DILLTQSPVILSVSPGERVSFSCRASQSIGTNIHW |
| | | | | YQQRTNGSPRLLIKYASESISGIPSRFSGSGSGTD |
| | | | | FTLSINSVESEDIADYYCQQNNNWPTTFGAGTKLE |
| | | | | LKRTVAAPDVVLTQTPVSLSVTLGDQASMSCRSSQ |
| | | | | SLEYSDGYTFLEWFLQKPGQSPQLLIYEVSNRFSG |
| | | | | VPDRFIGSGSGTDFTLKISRVEPEDLGVYYCFQAT |
| | | | | HDPLTFGSGTKLEIKR |
| 277 | DVD878H | AB059VH | AB033VH | EVQLVESGGGLVQPGSSLKLSCVASGFTTSNYGMN |
| | | | | WIRQAPKKGLEWIGMIYYDSSEKHYADSVKGRFTI |
| | | | | SRDNSKNTLYLEMNSLRSEDTAIYYCAKGTTPDYW |
| | | | | GQGVMVTVSSASTKGPSVFPLAPQVQLKQSGPGLV |
| | | | | QPSQSLSITCTVSGFSLTNYGVHWVRQSPGKGLEW |
| | | | | LGVIWSGGNTDYNTPFTSRLSINKDNSKSQVFFKM |
| | | | | NSLQSNDTAIYYCARALTYYDYEFAYWGQGTLVTV |
| | | | | SA |
| 278 | DVD878L | AB059VL | AV033VL | DVVLTQTPVSLSVTLGDQASMSCRSSQSLEYSDGY |
| | | | | TFLEWFLQKPGQSPQLLIYEVSNRFSGVPDRFIGS |
| | | | | GSGTDFTLKISRVEPEDLGVYYCFQATHDPLTFGS |
| | | | | GTKLEIKRTVAAPDILLTQSPVILSVSPGERVSFS |
| | | | | CRASQSIGTNIHWYQQRTNGSPRLLIKYASESISG |
| | | | | IPSRFSGSGSGTDFTLSINSVESEDIADYYCQQNN |
| | | | | NWPTTFGAGTKLELKR |

### Example 2.56

### Generation of EGFR (seq. 1) and RGMa DVD-Igs with Linker Set 4

TABLE 67

| | DVD | Outer | Inner | |
|---|---|---|---|---|
| SEQ | Variable | Variable | Variable | |
| ID | Domain | Domain | Domain | Sequence |
| NO | Name | Name | Name | 12345678901234567890123456789012345 |
| 279 | DVD883H | AB033VH | AB059VH | QVQLKQSGPGLVQPSQSLSITCTVSGFSLTNYGVH |
| | | | | WVRQSPGKGLEWLGVIWSGGNTDYNTPFTSRLSIN |
| | | | | KDNSKSQVFFKMNSLQSNDTAIYYCARALTYYDYE |
| | | | | FAYWGQGTLVTVSAASTKGPEVQLVESGGGLVQPG |
| | | | | SSLKLSCVASGFTFSNYGMNWIRQAPKKGLEWIGM |
| | | | | IYYDSSEKHYADSVKGRFTISRDNSKNTLYLEMNS |
| | | | | LRSEDTAIYYCAKGTTPDYWGQGVMVTVSS |
| 280 | DVD883L | AB033VL | AB059VL | DILLTQSPVILSVSPGERVSFSCRASQSIGTNIHW |
| | | | | YQQRTNGSPRLLIKYASESISGIPSRFSGSGSGTD |
| | | | | FTLSINSVESEDIADYYCQQNNNWPTTFGAGTKLE |
| | | | | LKRTVAAPSVFIFPPDVVLTQTPVSLSVTLGDQAS |
| | | | | MSCRSSQSLEYSDGYTFLEWFLQKPGQSPQLLIYE |
| | | | | VSNRFSGVPDRFIGSGSGTDFTLKISRVEPEDLGV |
| | | | | YYCFQATHDPLTFGSGTKLEIKR |
| 281 | DVD884H | AB059VH | AB033VH | EVQLVESGGGLVQPGSSLKLSCVASGFTFSNYGMN |
| | | | | WIRQAPKKGLEWIGMIYYDSSEKHYADSVKGRFTI |
| | | | | SRDNSKNTLYLEMNSLRSEDTAIYYCAKGTTPDYW |
| | | | | GQGVMVTVSSASTKGPQVQLKQSGPGLVQPSQSLS |
| | | | | ITCTVSGFSLTNYGVHWVRQSPGKGLEWLGVIWSG |
| | | | | GNTDYNTPFTSRLSINKDNSKSQVFFKMNSLQSND |
| | | | | TAIYYCARALTYYDYEFAYWGQGTLVTVSA |
| 282 | DVD884L | AB059VL | AB033VL | DVVLTQTPVSLSVTLGDQASMSCRSSQSLEYSDGY |
| | | | | TFLEWFLQKPGQSPQLLIYEVSNRFSGVPDRFIGS |
| | | | | GSGTDFTLKISRVEPEDLGVYYCFQATHDPLTFGS |
| | | | | GTKLEIKRTVAAPSVFIFPPDILLTQSPVILSVSP |
| | | | | GERVSFSCRASQSIGTNIHWYQQRTNGSPRLLIKY |
| | | | | ASESISGIPSRFSGSGSGTDFTLSINSVESEDIAD |
| | | | | YYCQQNNNWPTTFGAGTKLELKR |

### Example 2.57

### Generation of EGFR (seq. 1) and Tetanus Toxoid DVD-IgS with Linker Set 1

TABLE 68

| | DVD | Outer | Inner | |
|---|---|---|---|---|
| SEQ | Variable | Variable | Variable | |
| ID | Domain | Domain | Domain | Sequence |
| NO | Name | Name | Name | 12345678901234567890123456789012345 |
| 283 | DVD763H | AB033VH | AB095VH | QVQLKQSGPGLVQPSQSLSTTCTVSGFSLTNYGVH |
| | | | | WVRQSPGKGLEWLGVIWSGGNTDYNTPFTSRLSIN |
| | | | | KDNSKSQVFFKMNSLQSNDTAIYYCARALTYYDYE |
| | | | | FAYWGQGTLVTVSAASTKGPEVQLLESGGDLVRPG |
| | | | | GSLRLSCAASGFSFSRYGMSWVRQAPGKGLDWVAH |
| | | | | ISASAGATYYADSVKGRFTISRDNSKNTLFLQMNN |
| | | | | LRADDTAIYYCAKGGKQWLIPWFDPWGQGTLVTVS |
| | | | | S |
| 284 | DVD763L | AB033VL | AB095VL | DILLTQSPVILSVSPGERVSFSCRASQSIGTNIHW |
| | | | | YQQRTNGSPRLLIKYASESISGIPSRFSGSGSGTD |
| | | | | FTLSINSVESEDIADYYCQQNNNWPTTFGAGTKLE |
| | | | | LKRTVAAPDIQMTQSMSSVSASVGDRVTIACRASQ |
| | | | | DISDRLAWYQQKPGKVPKVLIYGASSLQSGVPSRF |
| | | | | SGSGSGTDFTLTINSLQPEDFATYYCQQANSFPLT |
| | | | | FGGGTKVEMKR |
| 285 | DVD764H | AB095VH | AB033VH | EVQLLESGGDLVRPGGSLRLSCAASGFSFSRYGMS |
| | | | | WVRQAPGKGLDWVAHISASAGATYYADSVKGRFTI |
| | | | | SRDNSKNTLFLQMNNLRADDTAIYYCAKGGKQWLI |
| | | | | PWFDPWGQGTLVTVSSASTKGPQVQLKQSGPGLVQ |
| | | | | PSQSLSITCTVSGFSLTNYGVHWVRQSPGKGLEWL |
| | | | | GVIWSGGNTDYNTPFTSRLSINKDNSKSQVFFKMN |
| | | | | SLQSNDTAIYYCARALTYYDYEFAYWGQGTLVTVS |
| | | | | A |
| 286 | DVD764L | AB095VL | AB033VL | DIQMTQSPSSVSASVGDRVTIACRASQDISDRLAW |
| | | | | YQQKPGKVPKVLIYGASSLQSGVPSRFSGSGSGTD |
| | | | | FTLTINSLQPEDFATYYCQQANSFPLTFGGGTKVE |
| | | | | MKRTVAAPDILLTQSPVILSVSPGERVSFSCRASQ |
| | | | | SIGTNIHWYQQRTNGSPRLLIKYASESISGIRSRF |
| | | | | SGSGSGTDFTLSINSVESEDIADYYCQQNNNWPTT |
| | | | | FGAGTKLELKR |

### Example 2.58

### Generation of EGFR (seq. 1) and Tetanus Toxoid DVD-IgS with Linker Set 2

TABLE 69

| | DVD | Outer | Inner | |
|---|---|---|---|---|
| SEQ | Variable | Variable | Variable | |
| ID | Domain | Domain | Domain | Sequence |
| NO | Name | Name | Name | 12345678901234567890123456789012345 |
| 287 | DVD873H | AB033VH | AB095VH | QVQLKQSGPGLVQPSQSLSITCTVSGFSLTNYGVH |
| | | | | WVRQSPGKGLEWLGVIWSGGNTDYNTPFTSRLSIN |
| | | | | KDNSKSQVFFKMNSLQSNDTAIYYCARALTYYDYE |
| | | | | FAYWGQGTLVTVSAASTKGPSVFPLAPEVQLLESG |
| | | | | GDLVRPGGSLRLSCAASGFSFSRYGMSWVRQAPGK |
| | | | | GLDWVAHISASAGATYYADSVKGRFTISRDNSKNT |
| | | | | LFLQMNNLRADDTAIYYCAKGGKQWLIPWFDPWGQ |
| | | | | GTLVTVSS |
| 288 | DVD873L | AB033VL | AB095VL | DILLTQSPVILSVSPGERVSFSCRASQSIGTNIHW |
| | | | | YQQRTNGSPRLLIKYASESISGIPSRFSGSGSGTD |
| | | | | FTLSINSVESEDIADYYCQQNNNWPTTFGAGTKLE |
| | | | | LKRTVAAPSVFIFPPDIQMTQSPSSVSASVGDRVT |
| | | | | IACRASQDISDRLAWYQQKPGKVPKVLIYGASSLQ |
| | | | | SGVPSRFSGSGSGTDFTLTINSLQPEDFATYYCQQ |
| | | | | ANSFPLTFGGGTKVEMKR |
| 289 | DVD874H | AB095VH | AB033VH | EVQLLESGGDLVRPGGSLRLSCAASGFSFSRYGMS |
| | | | | WVRQAPGKGLDWVAHISASAGATYYADSVKGRFTI |
| | | | | SRDNSKNTLFLQMNNLRADDTAIYYCAKGGKQWLI |
| | | | | PWFDPWGQGTLVTVSSASTKGPSVFPLAPQVQLKQ |
| | | | | SGPGLVQPSQSLSITCTVSGFSLTNYGVHWVRQSP |
| | | | | GKGLEWLGVIWSGGNTDYNTPFTSRLSINKDNSKS |
| | | | | QVFFKMNSLQSNDTAIYYCARALTYYDYEFAYWGQ |
| | | | | GTLVTVSA |
| 290 | DVD874L | AB095VL | AB033VL | DIQMTQSPSSVSASVGDRVTIACRASQDISDRLAW |
| | | | | YQQKPGKVPKVLIYGASSLQSGVPSRFSGSGSGTD |
| | | | | FTLTINSLQPEDFATYYCQQANSFPLTFGGGTKVE |
| | | | | MKRTVAAPSVFIFPPDILLTQSPVILSVSPGERVS |
| | | | | FSCRASQSIGTNIHWYQQRTNGSPRLLIKYASESI |
| | | | | SGIPSRFSGSGSGTDFTLSINSVESEDIADYYCQQ |
| | | | | NNNWPTTFGAGTKLELKR |

### Example 2.59

### Generation of EGFR (seq. 1) and Tetanus Toxoid DVD-Igs with Linker Set 3

TABLE 70

| | DVD | Outer | Inner | |
|---|---|---|---|---|
| SEQ | Variable | Variable | Variable | |
| ID | Domain | Domain | Domain | Sequence |
| NO | Name | Name | Name | 12345678901234567890123456789012345 |
| 291 | DVD879H | AB033VH | AB095VH | QVQLKQSGPGLVQPSQSLSITCTVSGFSLTNYGVH |
| | | | | WVRQSPGKGLEWLGVIWSGGNTDYNTPFTSRLSIN |
| | | | | KDNSKSQVFFKMNSLQSNDTAIYYCARALTYYDYE |
| | | | | FAYWGQGTLVTVSAASTKGPSVFPLAPEVQLLESG |
| | | | | GDLVRPGGSLRLSCAASGFSFSRYGMSWVRQAPGK |
| | | | | GLDWVAHISASAGATYYADSVKGRFTISRDNSKNT |
| | | | | LFLQMNNLRADDTAIYYCAKGGKQWLIPWFDPWGQ |
| | | | | GTLVTVSS |
| 292 | DVD879L | AV033VL | AB095VL | DILLTQSPVILSVSPGERVSFSCRASQSIGTNIHW |
| | | | | YQQRTNGSPRLLIKYASESISGIPSRFSGSGSGTD |
| | | | | FTLSINSVESEDIADYYCQQNNNWPTTFGAGTKLE |
| | | | | LKRTVAAPDIQMTQSPSSVSASVGDRVTIACRASQ |
| | | | | DISDRLAWYQQKPGKVPKVLIYGASSLQSGVPSRF |
| | | | | SGSGSGTDFTLTINSLQPEDFATYYCQQANSFPLT |
| | | | | FGGGTKVEMKR |
| 293 | DVD880H | AB095VH | AB033VH | EVQLLESGGDLVRPGGSLRLSCAASGFSFSRYGMS |
| | | | | WVRQAPGKGLDWVAHISASAGATYYADSVKGRFTI |
| | | | | SRDNSKNTLFLQMNNLRADDTAIYYCAKGGKQWLI |
| | | | | PWFDPWGQGTLVTVSSASTKGPSVFPLAPQVQLKQ |
| | | | | SGPGLVQPSQSLSITCTVSGFSLTNYGVHWVRQSP |
| | | | | GKGLEWLGVIWSGGNTDYNTPFTSRLSINKDNSKS |
| | | | | QVFFKMNSLQSNDTAIYYCARALTYYDYEFAYWGQ |
| | | | | GTLVTVSA |
| 294 | DVD880L | AB095VL | AV033VL | DIQMTQSPSSVSASVGDRVTIACRASQDISDRLAW |
| | | | | YQQKPGKVPKVLIYGASSLQSGVPSRFSGSGSGTD |
| | | | | FTLTINSLQPEDFATYYCQQANSFPLTFGGGTKVE |
| | | | | MKRTVAAPDILLTQSPVILSVSPGERVSFSCRASQ |
| | | | | SIGTNIHWYQQRTNGSPRLLIKYASESISGIPSRF |
| | | | | SGSGSGTDFTLSINSVESEDIADYYCQQNNNWPTT |
| | | | | FGAGTKLELKR |

### Example 2.60

### Generation of EGFR (seq. 1) and Tetanus Toxoid DVD-IgS with Linker Set 4

TABLE 71

| | DVD | Outer | Inner | |
|---|---|---|---|---|
| SEQ | Variable | Variable | Variable | |
| ID | Domain | Domain | Domain | Sequence |
| NO | Name | Name | Name | 12345678901234567890123456789012345 |
| 295 | DVD885H | AB033VH | AB095VH | QVQLKQSGPGLVQPSQSLSITCTVSGFSLTNYGVH |
| | | | | WVRQSPGKGLEWLGVIWSGGNTDYNTPFTSRLSIN |
| | | | | KDNSKSQVFFKMNSLQSNDTAIYYCARALTYYDYE |
| | | | | FAYWGQGTLVTVSAASTKGPEVQLLESGGDLVRPG |
| | | | | GSLRLSCAASGFSFSRYGMSWVRQAPGKGLDWVAH |
| | | | | ISASAGATYYADSVKGRFTISRDNSKNTLFLQMNN |
| | | | | LRADDTAIYYCAKGGKQWLIPWFDPWGQGTLVTVS |
| | | | | S |
| 296 | DVD885L | AB033VL | AB095VL | DILLTQSPVILSVSPGERVSFSCRASQSIGTNIHW |
| | | | | YQQRTNGSPRLLIKYASESISGIPSRFSGSGSGTD |
| | | | | FTLSINSVESEDIADYYCQQNNNWPTTFGAGTKLE |
| | | | | LKRTVAAPSVFIFPPDIQMTQSPSSVSASVGDRVT |
| | | | | IACRASQDISDRLAWYQQKPGKVPKVLIYGASSLQ |
| | | | | SGVPSRFSGSGSGTDFTLTINSLQPEDFATYYCQQ |
| | | | | ANSFPLTFGGGTKVEMKR |
| 297 | DVD886H | AB095VH | AB033VH | EVQLLESGGDLVRPGGSLRLSCAASGFSFSRYGMS |
| | | | | WVRQAPGKGLDWVAHISASAGATYYADSVKGRFTI |
| | | | | SRDNSKNTLFLQMNNLRADDTAIYYCAKGGKQWLI |
| | | | | PWFDPWGQGTLVTVSSASTKGPQVQLKQSGPGLVQ |
| | | | | PSQSLSITCTVSGFSLTNYGVHWVRQSPGKGLEWL |
| | | | | GVIWSGGNTDYNTPFTSRLSINKDNSKSQVFFKMN |
| | | | | SLQSNDTAIYYCARALTYYDYEFAYWGQGTLVTVS |
| | | | | A |
| 298 | DVD886L | AB095VL | AB033VL | DIQMTQSPSSVSASVGDRVTIACRASQDISDRLAW |
| | | | | YQQKPGKVPKVLIYGASSLQSGVPSRFSGSGSGTD |
| | | | | FTLTINSLQPEDFATYYCQQANSFPLTFGGGTKVE |
| | | | | MKRTVAAPSVFIFPPDILLTQSPVILSVSPGERVS |
| | | | | FSCRASQSIGTNIHWYQQRTNGSPRLLIKYASESI |
| | | | | SGIPSRFSGSGSGTDFTLSINSVESEDIADYYCQQ |
| | | | | NNNWPTTFGAGTKLELKR |

### Example 2.61

### Generation of VEGF (seq. 1) and Tetanus Toxoid DVD-Igs with Linker Set 1

TABLE 72

| | DVD | Outer | Inner | |
|---|---|---|---|---|
| SEQ | Variable | Variable | Variable | |
| ID | Domain | Domain | Domain | Sequence |
| NO | Name | Name | Name | 12345678901234567890123456789012345 |
| 299 | DVD869H | AB014VH | AB095VH | EVQLVESGGGLVQPGGSLRLSCAASGYTFTNYGMN |
| | | | | WVRQAPGKGLEWVGWINTYTGEPTYAADFKRRFTF |
| | | | | SLDTSKSTAYLQMNSLRAEDTAVYYCAKYPHYYGS |
| | | | | SHWYFDVWGQGTLVTVSSASTKGPEVQLLESGGDL |
| | | | | VRPGGSLRLSCAASGFSFSRYGMSWVRQAPGKGLD |
| | | | | WVAHISASAGATYYADSVKGRFTISRDNSKNTLFL |
| | | | | QMNNLRADDTAIYYCAKGGKQWLIPWFDPWGQGTL |
| | | | | VTVSS |
| 300 | DVD869L | AB014VL | AB095VL | DIQMTQSPSSLSASVGDRVTITCSASQDISNYLNW |
| | | | | YQQKPGKAPKVLIYFTSSLHSGVPSRFSGSGSGTD |
| | | | | FTLTISSLQPEDFATYYCQQYSTVPWTFGQGTKVE |
| | | | | IKRTVAAPDIQMTQSPSSVSASVGDRVTIACRASQ |
| | | | | DISDRLAWYQQKPGKVPKVLIYGASSLQSGVPSRF |
| | | | | SGSGSGTDFTLTINSLQPEDFATYYCQQANSFPLT |
| | | | | FGGGTKVEMKR |
| 301 | DVD870H | AB095VH | AB014VH | EVQLLESGGDLVRPGGSLRLSCAASGFSFSRYGMS |
| | | | | WVRQAPGKGLDWVAHISASAGATYYADSVKGRFTI |
| | | | | SRDNSKNTLFLQMNNLRADDTAIYYCAKGGKQWLI |
| | | | | PWFDPWGQGTLVTVSSASTKGPEVQLVESGGGLVQ |
| | | | | PGGSLRLSCAASGYTFTNYGMNWVRQAPGKGLEWV |
| | | | | GWINTYTGEPTYAADFKRRFTFSLDTSKSTAYLQM |
| | | | | NSLRAEDTAVYYCAKYPHYYGSSHWYFDVWGQGTL |
| | | | | VTVSS |
| 302 | DVD870L | AB095VL | AB014VL | DIQMTQSPSSVSASVGDRVTIACRASQDISDRLAW |
| | | | | YQQKPGKVPKVLIYGASSLQSGVPSRFSGSGSGTD |
| | | | | FTLTINSLQPEDFATYYCQQANSFPLTFGGGTKVE |
| | | | | MKRTVAAPDIQMTQSPSSLSASVGDRVTITCSASQ |
| | | | | DISNYLNWYQQKPGKAPKVLIYFTSSLHSGVPSRF |
| | | | | SGSGSGTDFTLTISSLQPEDFATYYCQQYSTVPWT |
| | | | | FGQGTKVEIKR |

### Example 2.62

### Generation of VEGF (seq. 1) and Tetanus Toxoid DVD-Igs with Linker Set 2

TABLE 73

| | DVD | Outer | Inner | |
|---|---|---|---|---|
| SEQ | Variable | Variable | Variable | |
| ID | Domain | Domain | Domain | Sequence |
| NO | Name | Name | Name | 12345678901234567890123456789012345 |
| 303 | DVD875H | AB014VH | AB095VH | EVQLVESGGGLVQPGGSLRLSCAASGYTFTNYGMN |
| | | | | WVRQAPGKGLEWVGWINTYTGEPTYAADFKRRFTF |
| | | | | SLDTSKSTAYLQMNSLRAEDTAVYYCAKYPHYYGS |
| | | | | SHWYKDVWGQGTLVTVSSASTKGPSVFPLAPEVQL |
| | | | | LESGGDLVRPGGSLRLSCAASGESFSRYGMSWVRQ |
| | | | | APGKGLDWVAHISASAGATYYADSVKGRFTISRDN |
| | | | | SKNTLFLQMNNLRADDTAIYYCAKGGKQWLIPWFD |
| | | | | PWGQGTLVTVSS |
| 304 | DVD875L | AB014VL | AB095VL | DIQMTQSPSSLSASVGDRVTITCSASQDISNYLNW |
| | | | | YQQKPGKAPKVLIYFTSSLHSGVPSRFSGSGSGTD |
| | | | | FTLTISSLQPEDFATYYCQQYSTVPWTFGQGTKVE |
| | | | | IKRTVAAPSVFIFPPDIQMTQSPSSVSASVGDRVT |
| | | | | IACRASQDISDRLAWYQQKPGKVPKVLIYGASSLQ |
| | | | | SGVPSRFSGSGSGTDFTLTINSLQPEDFATYYCQQ |
| | | | | ANSFPLTFGGGTKVEMKR |
| 305 | DVD876H | AB095VH | AB014VH | EVQLLESGGDLVRPGGSLRLSCAASGFSFSRYGMS |
| | | | | WVRQAPGKGLDWVAHISASAGATYYADSVKGRFTI |
| | | | | SRDNSKNTLFLQMNNLRADDTAIYYCAKGGKQWLI |
| | | | | PWFDPWGQGTLVTVSSASTKGPSVFPLAPEVQLVE |
| | | | | SGGGLVQPGGSLRLSCAASGYTFTNYGMNWVRQAP |
| | | | | GKGLEWVGWINTYTGEPTYAADFKRRFTFSLDTSK |
| | | | | STAYLQMNSLRAEDTAVYYCAKYPHYYGSSHWYFD |
| | | | | VWGQGTLVTVSS |
| 306 | DVD876L | AB095VL | AB014VL | DIQMTQSPSSVSASVGDRVTIACRASQDISDRLAW |
| | | | | YQQKPGKVPKVLIYGASSLQSGVPSRFSGSGSGTD |
| | | | | FTLTINSLQPEDFATYYCQQANSFPLTFGGGTKVE |
| | | | | MKRTVAAPSVFIFPPDIQMTQSPSSLSASVGDRVT |
| | | | | ITCSASQDISNYLNWYQQKPGKAPKVLIYFTSSLH |
| | | | | SGVPSRFSGSGSGTDFTLTISSLQPEDFATYYCQQ |
| | | | | YSTVPWTFGQGTKVEIKR |

### Example 2.63

### Generation of VEGF (seq. 1) and Tetanus Toxoid DVD-Igs with Linker Set 3

TABLE 74

| | DVD | Outer | Inner | |
|---|---|---|---|---|
| SEQ | Variable | Variable | Variable | |
| ID | Domain | Domain | Domain | Sequence |
| NO | Name | Name | Name | 12345678901234567890123456789012345 |
| 307 | DVD881H | AB014VH | AB095VH | EVQLVESGGGLVQPGGSLRLSCAASGYTFTNYGMN |
| | | | | WVRQAPGKGLEWVGWINTYTGEPTYAADFKRRFTF |
| | | | | SLDTSKSTAYLQMNSLRAEDTAVYYCAKYPHYYGS |
| | | | | SHWYKDVWGQGTLVTVSSASTKGPSVFPLAPEVQL |
| | | | | LESGGDLVRPGGSLRLSCAASGESFSRYGMSWVRQ |
| | | | | APGKGLDWVAHISASAGATYYADSVKGRFTISRDN |
| | | | | SKNTLFLQMNNLRADDTAIYYCAKGGKQWLIPWFD |
| | | | | PWGQGTLVTVSS |
| 308 | DVD881L | AB014VL | AB095VL | DIQMTQSPSSLSASVGDRVTITCSASQDISNYLNW |
| | | | | YQQKPGKAPKVLIYFTSSLHSGVPSRFSGSGSGTD |
| | | | | FTLTISSLQPEDFATYYCQQYSTVPWTFGQGTKVE |
| | | | | IKRTVAAPDIQMTQSPSSVSASVGDRVTIACRASQ |
| | | | | DISDRLAWYQQKPGKVPKVLIYGASSLQSGVPSRF |
| | | | | SGSGSGTDFTLTINSLQPEDFATYYCQQANSFPLT |
| | | | | FGGGTKVEMKR |
| 309 | DVD882H | AB095VH | AB014VH | EVQLLESGGDLVRPGGSLRLSCAASGFSFSRYGMS |
| | | | | WVRQAPGKGLDWVAHISASAGATYYADSVKGRFTI |
| | | | | SRDNSKNTLFLQMNNLRADDTAIYYCAKGGKQWLI |
| | | | | PWFDPWGQGTLVTVSSASTKGPSVFPLAPEVQLVE |
| | | | | SGGGLVQPGGSLRLSCAASGYTFTNYGMNWVRQAP |
| | | | | GKGLEWVGWINTYTGEPTYAADFKRRFTFSLDTSK |
| | | | | STAYLQMNSLRAEDTAVYYCAKYPHYYGSSHWYFD |
| | | | | VWGQGTLVTVSS |
| 310 | DVD882L | AB095VL | AB014VL | DIQMTQSPSSVSASVGDRVTIACRASQDISDRLAW |
| | | | | YQQKPGKVPKVLIYGASSLQSGVPSRFSGSGSGTD |
| | | | | FTLTINSLQPEDFATYYCQQANSFPLTFGGGTKVE |
| | | | | MKRTVAAPDIQMTQSPSSLSASVGDRVTITCSASQ |
| | | | | DISNYLNWYQQKPGKAPKVLIYFTSSLHSGVPSRF |
| | | | | SGSGSGTDFTLTISSLQPEDFATYYCQQYSTVPWT |
| | | | | FGQGTKVEIKR |

### Example 2.64

### Generation of VEGF (seq. 1) and Tetanus Toxoid DVD-Igs with Linker Set 4

TABLE 75

| | DVD | Outer | Inner | |
|---|---|---|---|---|
| SEQ | Variable | Variable | Variable | |
| ID | Domain | Domain | Domain | Sequence |
| NO | Name | Name | Name | 12345678901234567890123456789012345 |
| 311 | DVD887H | AB014VH | AB095VH | EVQLVESGGGLVQPGGSLRLSCAASGYTFTNYGMN |
| | | | | WVRQAPCKGLEWVGWINTYTGEPTYAADFKRRFTF |
| | | | | SLDTSKSTAYLQMNSLRAEDTAVYYCAKYPHYYGS |
| | | | | SHWYFDVWGQGTLVTVSSASTKGPEVQLLESGGDL |
| | | | | VRPGGSLRLSCAASGFSFSRYGMSWVRQAPGKGLD |
| | | | | WVAHISASAGATYYADSVKGRFTISRDNSKNTLFL |
| | | | | QMNNLRADDTAIYYCAKGGKQWLIPWFDPWGQGTL |
| | | | | VTVSS |
| 312 | DVD887L | AB014VL | AB095VL | DIQMTQSPSSLSASVGDRVTITCSASQDISNYLNW |
| | | | | YQQKPGKAPKVLIYFTSSLHSGVPSRFSGSGSGTD |
| | | | | FTLTISSLQPEDFATYYCQQYSTVPWTFGQGTKVE |
| | | | | IKRTVAAPSVFIFPPDIQMTQSPSSVSASVGDRVT |
| | | | | IACRASQDISDRLAWYQQKPCKVPKVLIYGASSLQ |
| | | | | SGVPSRFSGSGSGTDFTLTINSLQPEDFATYYCQQ |
| | | | | ANSFPLTFGGGTKVEMKR |
| 313 | DVD888H | AB095VH | AB014VH | EVQLLESCGDLVRPGGSLRLSCAASCFSFSRYGMS |
| | | | | WVRQAPGKGLDWVAHISASAGATYYADSVKGRFTI |
| | | | | SRDNSKNTLFLQMNNLRADDTAIYYCAKGGKQWLI |
| | | | | PWFDPWGQGTLVTVSSASTKGPEVQLVESGGGLVQ |
| | | | | PGGSLRLSCAASGYTFTNYGMNWVRQAPCKGLEWV |
| | | | | GWINTYTGEPTYAADFKRRFTFSLDTSKSTAYLQM |
| | | | | NSLRAEDTAVYYCAKYPHYYGSSHWYFDVWGQGTL |
| | | | | VTVSS |
| 314 | DVD888L | AB095VL | AB014VL | DIQMTQSPSSVSASVGDRVTIACRASQDISDRLAW |
| | | | | YQQKPGKVPKVLIYGASSLQSGVPSRFSGSGSGTD |
| | | | | FTLTINSLQPEDFATYYCQQANSFPLTFGGGTKVE |
| | | | | MKRTVAAPSVFIFPPDIQMTQSPSSLSASVGDRVT |
| | | | | ITCSASQDISNYLNWYQQKPGKAPKVLIYFTSSLH |
| | | | | SGVPSRFSGSGSGTDFTLTISSLQPEDFATYYCQQ |
| | | | | YSTVPWTFGQGTKVEIKR |

### Example 2.65

### Generation of Tetanus Toxoid and Tetanus Toxoid DVD-IgS with Linker Set 1

TABLE 76

| | DVD | Outer | Inner | |
|---|---|---|---|---|
| SEQ | Variable | Variable | Variable | |
| ID | Domain | Domain | Domain | Sequence |
| NO | Name | Name | Name | 12345678901234567890123456789012345 |
| 315 | DVD889H | AB095VH | AB095VH | EVQLLESGGDLVRPGGSLRLSCAASGFSFSRYGMS |
| | | | | WVRQAPGKGLDWVAHISASAGATYYADSVKGRFTI |
| | | | | SRDNSKNTLFLQMNNLRADDTAIYYCAKGGKQWLI |
| | | | | PWFDPWGQGTLVTVSSASTKGPEVQLLESGGDLVR |
| | | | | PGGSLRLSCAASGFSFSRYGMSWVRQAPGKGLDWV |
| | | | | AHISASAGATYYADSVKGRFTISRDNSKNTLFLQM |
| | | | | NNLRADDTAIYYCAKGGKQWLIPWFDPWGQGTLVT |
| | | | | VSS |
| 316 | DVD889L | AB095VL | AB095VL | DIQMTQSPSSVSASVGDRVTIACRASQDISDRLAW |
| | | | | YQQKPGKVPKVLIYGASSLQSGVPSRFSGSGSGTD |
| | | | | FTLTINSLQPEDFATYYCQQANSFPLTFGGGTKVE |
| | | | | MKRTVAAPDIQMTQSPSSVSASVGDRVTIACRASQ |
| | | | | DISDRLAWYQQKPGKVPKVLIYGASSLQSGVPSRF |
| | | | | SGSGSGTDFTLTINSLQPEDFATYYCQQANSFPLT |
| | | | | FGGGTKVEMKR |
| 317 | DVD890H | AB095VH | AB095VH | EVQLLESGGDLVRPGGSLRLSCAASGFSFSRYGMS |
| | | | | WVRQAPGKGLDWVAHISASAGATYYADSVKGRFTI |
| | | | | SRDNSKNTLFLQMNNLRADDTAIYYCAKGGKQWLI |
| | | | | PWFDPWGQGTLVTVSSASTKGPSVFPLAPEVQLLE |
| | | | | SGGDLVRPGGSLRLSCAASGFSFSRYGMSWVRQAP |
| | | | | GKGLDWVAHISASAGATYYADSVKGRFTISRDNSK |
| | | | | NTLFLQMNNLRADDTAIYYCAKGGKQWLIPWFDPW |
| | | | | GQGTLVTVSS |
| 318 | DVD890L | AB095VL | AB095VL | DIQMTQSPSSVSASVGDRVTIACRASQDISDRLAW |
| | | | | YQQKPGKVPKVLIYGASSLQSGVPSRFSGSGSGTD |
| | | | | FTLTINSLQPEDFATYYCQQANSFPLTFGGGTKVE |
| | | | | MKRTVAAPSVFIFPPDIQMTQSPSSVSASVGDRVT |
| | | | | IACRASQDISDRLAWYQQKPGKVPKVLIYGASSLQ |
| | | | | SGVPSRFSGSGSGTDFTLTINSLQPEDFATYYCQQ |
| | | | | ANSFPLTFGGGTKVEMKR |

### Example 2.66

### Generation of Tetanus Toxoid and Tetanus Toxoid DVD-IgS with Linker Set 2

TABLE 77

| | DVD | Outer | Inner | |
|---|---|---|---|---|
| SEQ | Variable | Variable | Variable | |
| ID | Domain | Domain | Domain | Sequence |
| NO | Name | Name | Name | 12345678901234567890123456789012345 |
| 319 | DVD891H | AB095VH | AB095VH | EVQLLESGGDLVRPGGSLRLSCAASGFSFSRYGMS |
| | | | | WVRQAPGKGLDWVAHISASAGATYYADSVKGRFTI |
| | | | | SRDNSKNTLFLQMNNLRADDTAIYYCAKGGKQWLI |
| | | | | PWFDPWGQGTLVTVSSASTKGPSVFPLAPEVQLLE |
| | | | | SGGDLVRPGGSLRLSCAASGFSFSRYGMSWVRQAP |
| | | | | GKGLDWVAHISASAGATYYADSVKGRFTISRDNSK |
| | | | | NTLFLQMNNLRADDTAIYYCAKGGKQWLIPWFDPW |
| | | | | GQGTLVTVSS |
| 320 | DVD891L | AB095VL | AB095VL | DIQMTQSPSSVSASVGDRVTIACRASQDISDRLAW |
| | | | | YQQKPGKVPKVLIYGASSLQSGVPSRFSGSGSGTD |
| | | | | FTLTINSLQPEDFATYYCQQANSFPLTFGGGTKVE |
| | | | | MKRTVAAPDIQMTQSPSSVSASVGDRVTIACRASQ |
| | | | | DISDRLAWYQQKPGKVPKVLIYGASSLQSGVPSRF |
| | | | | SGSGSGTDFTLTINSLQPEDFATYYCQQANSFPLT |
| | | | | FGGGTKVEMKR |
| 321 | DVD892H | AB095VH | AB095VH | EVQLLESGGDLVRPGGSLRLSCAASGFSFSRYGMS |
| | | | | WVRQAPGKGLDWVAHISASAGATYYADSVKGRFTI |
| | | | | SRDNSKNTLFLQMNNLRADDTAIYYCAKGGKQWLI |
| | | | | PWFDPWGQGTLVTVSSASTKGPEVQLLESGGDLVR |
| | | | | PGGSLRLSCAASGFSFSRYGMSWVRQAPGKGLDWV |
| | | | | AHISASAGATYYADSVKGRFTISRDNSKNTLFLQM |
| | | | | NNLRADDTAIYYCAKGGKQWLIPWFDPWGQGTLVT |
| | | | | VSS |
| 322 | DVD892L | AB095VL | AB095VL | DIQMTQSPSSVSASVGDRVTIACRASQDISDRLAW |
| | | | | YQQKPGKVPKVLIYGASSLQSGVPSRFSGSGSGTD |
| | | | | FTLTINSLQPEDFATYYCQQANSFPLTFGGGTKVE |
| | | | | MKRTVAAPSVFIFPPDIQMTQSPSSVSASVGDRVT |
| | | | | IACRASQDISDRLAWYQQKPGKVPKVLIYGASSLQ |
| | | | | SGVPSRFSGSGSGTDFTLTINSLQPEDFATYYCQQ |
| | | | | ANSFPLTFGGGTKVEMKR |

[0590] The present invention incorporates by reference in their entirety techniques well known in the field of molecular biology and drug delivery. These techniques include, but are not limited to, techniques described in the following publications:
[0591] Ausubel et al. (eds.), Current Protocols in Molecular Biology, John Wiley &Sons, NY (1993);
[0592] Ausubel, F. M. et al. eds., Short Protocols In Molecular Biology (4th Ed. 1999) John Wiley & Sons, NY. (ISBN 0-471-32938-X).
[0593] Controlled Drug Bioavailability, Drug Product Design and Performance, Smolen and Ball (eds.), Wiley, New York (1984);
[0594] Giege, R. and Ducruix, A. Barrett, Crystallization of Nucleic Acids and Proteins, a Practical Approach, 2nd ea., pp. 20 1-16, Oxford University Press, New York, N.Y., (1999);
[0595] Goodson, in Medical Applications of Controlled Release, vol. 2, pp. 115-138 (1984);
[0596] Hammerling, et al., in: Monoclonal Antibodies and T-Cell Hybridomas 563-681 (Elsevier, N.Y., 1981;
[0597] Harlow et al., Antibodies: A Laboratory Manual, (Cold Spring Harbor Laboratory Press, 2nd ed. 1988);
[0598] Kabat et al., Sequences of Proteins of Immunological Interest (National Institutes of Health, Bethesda, Md. (1987) and (1991);
[0599] Kabat, E. A., et al. (1991) Sequences of Proteins of Immunological Interest, Fifth Edition, U.S. Department of Health and Human Services, NIH Publication No. 91-3242;
[0600] Kontermann and Dubel eds., Antibody Engineering (2001) Springer-Verlag. New York. 790 pp. (ISBN 3-540-41354-5).
[0601] Kriegler, Gene Transfer and Expression, A Laboratory Manual, Stockton Press, NY (1990);
[0602] Lu and Weiner eds., Cloning and Expression Vectors for Gene Function Analysis (2001) BioTechniques Press. Westborough, Mass. 298 pp. (ISBN 1-881299-21-X).
[0603] Medical Applications of Controlled Release, Langer and Wise (eds.), CRC Pres., Boca Raton, Fla. (1974);
[0604] Old, R. W. & S. B. Primrose, Principles of Gene Manipulation: An Introduction To Genetic Engineering (3d Ed. 1985) Blackwell Scientific Publications, Boston. Studies in Microbiology; V.2:409 pp. (ISBN 0-632-01318-4).
[0605] Sambrook, J. et al. eds., Molecular Cloning: A Laboratory Manual (2d Ed. 1989) Cold Spring Harbor Laboratory Press, NY. Vols. 1-3. (ISBN 0-87969-309-6).
[0606] Sustained and Controlled Release Drug Delivery Systems, J. R. Robinson, ed., Marcel Dekker, Inc., New York, 1978
[0607] Winnacker, E. L. From Genes To Clones: Introduction To Gene Technology (1987) VCH Publishers, NY (translated by Horst Ibelgaufts). 634 pp. (ISBN 0-89573-614-4).

### INCORPORATION BY REFERENCE

[0608] The contents of all cited references (including literature references, patents, patent applications, and websites) that maybe cited throughout this application are hereby expressly incorporated by reference in their entirety, as are the references cited therein. The practice of the present invention will employ, unless otherwise indicated, conventional techniques of immunology, molecular biology and cell biology, which are well known in the art.

### EQUIVALENTS

[0609] The invention may be embodied in other specific forms without departing from the spirit or essential characteristics thereof. The foregoing embodiments are therefore to be considered in all respects illustrative rather than limiting of the invention described herein. Scope of the invention is thus indicated by the appended claims rather than by the foregoing description, and all changes that come within the meaning and range of equivalency of the claims are therefore intended to be embraced herein.

1.-38. (canceled)

39. A binding protein comprising first and second polypeptide chains, each independently comprising VD1-(X1)n-VD2-C-(X2)n, wherein
VD1 is a first variable domain;
VD2 is a second variable domain;
C is a constant domain;
X1 is a linker;
X2 is an Fc region;
n is 0 or 1,
wherein the VD1 domains on the first and second polypeptide chains form a first functional target binding site and the VD2 domains on the first and second polypeptide chains form a second functional target binding site, and wherein the binding protein is capable of binding
a. EGFR and IGF1R, wherein
1) the variable domains that form a functional target binding site for EGFR comprise CDRs 1-3 from SEQ ID NO: 49 and CDRs 1-3 from SEQ ID NO: 50, and
2) the variable domains that form a functional target binding site for IGFR1 comprise CDRs 1-3 from SEQ ID NO: 31 and CDRs 1-3 from SEQ ID NO: 32;
b. EGFR and RON, wherein
1) the variable domains that form a functional target binding site for EGFR comprise CDRs 1-3 from SEQ ID NO: 49 and CDRs 1-3 from SEQ ID NO: 50, and
2) the variable domains that form a functional target binding site for RON comprise CDRs 1-3 from SEQ ID NO: 29 and CDRs 1-3 from SEQ ID NO: 30;
c. EGFR and HGF, wherein
1) the variable domains that form a functional target binding site for EGFR comprise CDRs 1-3 from SEQ ID NO: 49 and CDRs 1-3 from SEQ ID NO: 50, and
2) the variable domains that form a functional target binding site for HGF comprise CDRs 1-3 from SEQ ID NO: 33 and CDRs 1-3 from SEQ ID NO: 34;
d. EGFR and VEGF, wherein
1) the variable domains that form a functional target binding site for EGFR comprise CDRs 1-3 from SEQ ID NO: 49 and CDRs 1-3 from SEQ ID NO: 50, and
2) the variable domains that form a functional target binding site for VEGF comprise
CDRs 1-3 from SEQ ID NO: 35 and CDRs 1-3 from SEQ ID NO: 36,
CDRs 1-3 from SEQ ID NO: 53 and CDRs 1-3 from SEQ ID NO: 54, or
CDRs 1-3 from SEQ ID NO: 55 and CDRs 1-3 from SEQ ID NO: 56;
e. EGFR and ErbB3, wherein
1) the variable domains that form a functional target binding site for EGFR comprise CDRs 1-3 from SEQ ID NO: 49 and CDRs 1-3 from SEQ ID NO: 50, and
2) the variable domains that form a functional target binding site for ErbB3 comprise
CDRs 1-3 from SEQ ID NO: 45 and CDRs 1-3 from SEQ ID NO: 46,
CDRs 1-3 from SEQ ID NO: 47 and CDRs 1-3 from SEQ ID NO: 48, or
CDRs 1-3 from SEQ ID NO: 51 and CDRs 1-3 from SEQ ID NO: 52;
f. EGFR and DLL-4, wherein
1) the variable domains that form a functional target binding site for EGFR comprise CDRs 1-3 from SEQ ID NO: 49 and CDRs 1-3 from SEQ ID NO: 50, and
2) the variable domains that form a functional target binding site for DLL-4 comprise CDRs 1-3 from SEQ ID NO: 37 and CDRs 1-3 from SEQ ID NO: 38;
g. EGFR and PLGF, wherein
1) the variable domains that form a functional target binding site for EGFR comprise CDRs 1-3 from SEQ ID NO: 49 and CDRs 1-3 from SEQ ID NO: 50, and
2) the variable domains that form a functional target binding site for PLGF comprise CDRs 1-3 from SEQ ID NO: 41 and CDRs 1-3 from SEQ ID NO: 42;
or
h. EGFR and EGFR, wherein the variable domains that form functional target binding sites for EGFR independently comprise
CDRs 1-3 from SEQ ID NO: 49 and CDRs 1-3 from SEQ ID NO: 50, and
CDRs 1-3 from SEQ ID NO: 39 and CDRs 1-3 from SEQ ID NO: 40.

40. The binding protein of claim 39, wherein the binding protein is capable of binding
a. EGFR and IGF1R, wherein
1) the variable domains that form a functional target binding site for EGFR comprise SEQ ID NO: 49 and SEQ ID NO: 50, and
2) the variable domains that form a functional target binding site for IGFR1 comprise SEQ ID NO: 31 and SEQ ID NO: 32;
b. EGFR and RON, wherein
1) the variable domains that form a functional target binding site for EGFR comprise SEQ ID NO: 49 and SEQ ID NO: 50, and
2) the variable domains that form a functional target binding site for RON comprise SEQ ID NO: 29 and SEQ ID NO: 30;
c. EGFR and HGF, wherein
1) the variable domains that form a functional target binding site for EGFR comprise SEQ ID NO: 49 and SEQ ID NO: 50, and
2) the variable domains that form a functional target binding site for HGF comprise SEQ ID NO: 33 and SEQ ID NO: 34;
d. EGFR and VEGF, wherein
1) the variable domains that form a functional target binding site for EGFR comprise SEQ ID NO: 49 and SEQ ID NO: 50, and
2) the variable domains that form a functional target binding site for VEGF comprise
SEQ ID NO: 35 and SEQ ID NO: 36,
SEQ ID NO: 53 and SEQ ID NO: 54, or
SEQ ID NO: 55 and SEQ ID NO: 56;
e. EGFR and ErbB3, wherein
1) the variable domains that form a functional target binding site for EGFR comprise SEQ ID NO: 49 and SEQ ID NO: 50, and
2) the variable domains that form a functional target binding site for ErbB3 comprise
SEQ ID NO: 45 and SEQ ID NO: 46,
SEQ ID NO: 47 and SEQ ID NO: 48, or
SEQ ID NO: 51 and SEQ ID NO: 52;
f. EGFR and DLL-4, wherein
1) the variable domains that form a functional target binding site for EGFR comprise SEQ ID NO: 49 and SEQ ID NO: 50, and
2) the variable domains that form a functional target binding site for DLL-4 comprise SEQ ID NO: 37 and SEQ ID NO: 38;
g. EGFR and PLGF, wherein
1) the variable domains that form a functional target binding site for EGFR comprise SEQ ID NO: 49 and SEQ ID NO: 50, and
2) the variable domains that form a functional target binding site for PLGF comprise SEQ ID NO: 41 and SEQ ID NO: 42;
or
h. EGFR and EGFR, wherein the variable domains that form functional target binding sites for EGFR independently comprise
SEQ ID NO: 49 and SEQ ID NO: 50, and
SEQ ID NO: 39 and SEQ ID NO: 40.

41. The binding protein of claim 39, comprising first and second polypeptide chains, wherein
the first polypeptide chain comprises a first VD1-(X1)n-VD2-C-(X2)n, wherein
VD1 is a first heavy chain variable domain;
VD2 is a second heavy chain variable domain;
C is a heavy chain constant domain;
X1 is a linker;
X2 is an Fc region;
n is 0 or 1; and
the second polypeptide chain comprises a second VD1-(X1)n-VD2-C-(X2)n, wherein
VD1 is a first light chain variable domain;
VD2 is a second light chain variable domain;
C is a light chain constant domain;
X1 is a linker;
n is 0 or 1 for (X1)n; and
n is 0 for (X2)n.

42. The binding protein of claim 39, wherein X1 is not CL.

43. The binding protein of claim 39, wherein X1 is selected from the group consisting of SEQ ID NOs: 1-26, a G/S sequence, and SEQ ID NO: 329.

44. The binding protein of claim 39, wherein the Fc region is a native sequence Fc region or a variant sequence Fc region.

45. The binding protein of claim 39, wherein the Fc region is from an IgG1, IgG2, IgG3, IgG4, IgA, IgM, IgE, or IgD.

46. The binding protein of claim 39, wherein the binding protein is capable of binding
a. EGFR and IGF1R and comprises
DVD775 (comprising SEQ ID NO: 143 and SEQ ID NO: 144),
DVD805 (comprising SEQ ID NO: 147 and SEQ ID NO: 148),
DVD806 (comprising SEQ ID NO: 149 and SEQ ID NO: 150),
DVD835 (comprising SEQ ID NO: 151 and SEQ ID NO: 152), or
DVD836 (comprising SEQ ID NO: 153 and SEQ ID NO: 154);
b. EGFR and RON and comprises
DVD326 (comprising SEQ ID NO: 77 and SEQ ID NO: 78),
DVD767 (comprising SEQ ID NO: 79 and SEQ ID NO: 80),
DVD768 (comprising SEQ ID NO: 81 and SEQ ID NO: 82),
DVD797 (comprising SEQ ID NO: 83 and SEQ ID NO: 84),
DVD798 (comprising SEQ ID NO: 85 and SEQ ID NO: 86), or
DVD828 (comprising SEQ ID NO: 89 and SEQ ID NO: 90);
c. EGFR and HGF and comprises
DVD777 (comprising SEQ ID NO: 159 and SEQ ID NO: 160),
DVD778 (comprising SEQ ID NO: 161 and SEQ ID NO: 162),
DVD808 (comprising SEQ ID NO: 165 and SEQ ID NO: 166),
DVD837 (comprising SEQ ID NO: 167 and SEQ ID NO: 168), or
DVD838 (comprising SEQ ID NO: 169 and SEQ ID NO: 170);
d. EGFR and VEGF and comprises
DVD337 (comprising SEQ ID NO: 171 and SEQ ID NO: 172),
DVD779 (comprising SEQ ID NO: 175 and SEQ ID NO: 176),
DVD809 (comprising SEQ ID NO: 179 and SEQ ID NO: 180),
DVD839 (comprising SEQ ID NO: 183 and SEQ ID NO: 184),
DVD840 (comprising SEQ ID NO: 185 and SEQ ID NO: 186),
DVD789 (comprising SEQ ID NO: 239 and SEQ ID NO: 240),
DVD790 (comprising SEQ ID NO: 241 and SEQ ID NO: 242),
DVD819 (comprising SEQ ID NO: 243 and SEQ ID NO: 244),
DVD820 (comprising SEQ ID NO: 245 and SEQ ID NO: 246),
DVD849 (comprising SEQ ID NO: 247 and SEQ ID NO: 248),
DVD850 (comprising SEQ ID NO: 249 and SEQ ID NO: 250),
DVD791 (comprising SEQ ID NO: 255 and SEQ ID NO: 256),
DVD792 (comprising SEQ ID NO: 257 and SEQ ID NO: 258),
DVD821 (comprising SEQ ID NO: 259 and SEQ ID NO: 260),
DVD822 (comprising SEQ ID NO: 261 and SEQ ID NO: 262),
DVD851 (comprising SEQ ID NO: 263 and SEQ ID NO: 264), or
DVD852 (comprising SEQ ID NO: 265 and SEQ ID NO: 266);
e. EGFR and ErbB3 and comprises
DVD769 (comprising SEQ ID NO: 95 and SEQ ID NO: 96),
DVD770 (comprising SEQ ID NO: 97 and SEQ ID NO: 98),
DVD799 (comprising SEQ ID NO: 99 and SEQ ID NO: 100),
DVD800 (comprising SEQ ID NO: 101 and SEQ ID NO: 102),
DVD830 (comprising SEQ ID NO: 105 and SEQ ID NO: 106),
DVD771 (comprising SEQ ID NO: 111 and SEQ ID NO: 112),
DVD772 (comprising SEQ ID NO: 113 and SEQ ID NO: 114),
DVD801 (comprising SEQ ID NO: 115 and SEQ ID NO: 116),
DVD831 (comprising SEQ ID NO: 119 and SEQ ID NO: 120),
DVD832 (comprising SEQ ID NO: 121 and SEQ ID NO: 122),
DVD755 (comprising SEQ ID NO: 219 and SEQ ID NO: 220),
DVD756 (comprising SEQ ID NO: 221 and SEQ ID NO: 222),
DVD787 (comprising SEQ ID NO: 223 and SEQ ID NO: 224),
DVD788 (comprising SEQ ID NO: 225 and SEQ ID NO: 226),
DVD817 (comprising SEQ ID NO: 227 and SEQ ID NO: 228),
DVD818 (comprising SEQ ID NO: 229 and SEQ ID NO: 230),
DVD847 (comprising SEQ ID NO: 231 and SEQ ID NO: 232), or
DVD848 (comprising SEQ ID NO: 233 and SEQ ID NO: 234);
f. EGFR and DLL-4 and comprises
DVD339 (comprising SEQ ID NO: 187 and SEQ ID NO: 188),
DVD781 (comprising SEQ ID NO: 191 and SEQ ID NO: 192),
DVD782 (comprising SEQ ID NO: 193 and SEQ ID NO: 194),
DVD811 (comprising SEQ ID NO: 195 and SEQ ID NO: 196),
DVD841 (comprising SEQ ID NO: 199 and SEQ ID NO: 200), or
DVD842 (comprising SEQ ID NO: 201 and SEQ ID NO: 202);
g. EGFR and PLGF and comprises
DVD341 (comprising SEQ ID NO: 203 and SEQ ID NO: 204),
DVD783 (comprising SEQ ID NO: 207 and SEQ ID NO: 208),
DVD784 (comprising SEQ ID NO: 209 and SEQ ID NO: 210),
DVD813 (comprising SEQ ID NO: 211 and SEQ ID NO: 212),
DVD814 (comprising SEQ ID NO: 213 and SEQ ID NO: 214),
DVD843 (comprising SEQ ID NO: 215 and SEQ ID NO: 216), or
DVD844 (comprising SEQ ID NO: 217 and SEQ ID NO: 218);
or
h. EGFR and EGFR and comprises
DVD321 (comprising SEQ ID NO: 59 and SEQ ID NO: 60),
DVD322 (comprising SEQ ID NO: 61 and SEQ ID NO: 62),
DVD765 (comprising SEQ ID NO: 63 and SEQ ID NO: 64),
DVD766 (comprising SEQ ID NO: 65 and SEQ ID NO: 66),
DVD795 (comprising SEQ ID NO: 67 and SEQ ID NO: 68),
DVD796 (comprising SEQ ID NO: 69 and SEQ ID NO: 70),
DVD825 (comprising SEQ ID NO: 71 and SEQ ID NO: 72), or
DVD826 (comprising SEQ ID NO: 73 and SEQ ID NO: 74).

47. The binding protein of claim 39, wherein the binding protein is capable of binding
a. EGFR and IGF1R and comprises
SEQ ID NO: 143 and SEQ ID NO: 144,
SEQ ID NO: 147 and SEQ ID NO: 148,
SEQ ID NO: 149 and SEQ ID NO: 150,
SEQ ID NO: 151 and SEQ ID NO: 152, or
SEQ ID NO: 153 and SEQ ID NO: 154;
b. EGFR and RON and comprises
SEQ ID NO: 77 and SEQ ID NO: 78,
SEQ ID NO: 79 and SEQ ID NO: 80,
SEQ ID NO: 81 and SEQ ID NO: 82,
SEQ ID NO: 83 and SEQ ID NO: 84,
SEQ ID NO: 85 and SEQ ID NO: 86, or
SEQ ID NO: 89 and SEQ ID NO: 90;
c. EGFR and HGF and comprises
SEQ ID NO: 159 and SEQ ID NO: 160,
SEQ ID NO: 161 and SEQ ID NO: 162,
SEQ ID NO: 165 and SEQ ID NO: 166,
SEQ ID NO: 167 and SEQ ID NO: 168, or
SEQ ID NO: 169 and SEQ ID NO: 170;
d. EGFR and VEGF and comprises
SEQ ID NO: 171 and SEQ ID NO: 172,
SEQ ID NO: 175 and SEQ ID NO: 176,
SEQ ID NO: 179 and SEQ ID NO: 180,
SEQ ID NO: 183 and SEQ ID NO: 184,
SEQ ID NO: 185 and SEQ ID NO: 186,
SEQ ID NO: 239 and SEQ ID NO: 240,
SEQ ID NO: 241 and SEQ ID NO: 242,
SEQ ID NO: 243 and SEQ ID NO: 244,
SEQ ID NO: 245 and SEQ ID NO: 246,
SEQ ID NO: 247 and SEQ ID NO; 248,
SEQ ID NO: 249 and SEQ ID NO: 250,
SEQ ID NO: 255 and SEQ ID NO: 256,
SEQ ID NO: 257 and SEQ ID NO: 258,
SEQ ID NO: 259 and SEQ ID NO: 260,
SEQ ID NO: 261 and SEQ ID NO: 262,
SEQ ID NO: 263 and SEQ ID NO: 264, or
SEQ ID NO: 265 and SEQ ID NO: 266;
e. EGFR and ErbB3 and comprises
SEQ ID NO: 95 and SEQ ID NO: 96,
SEQ ID NO: 97 and SEQ ID NO: 98,
SEQ ID NO: 99 and SEQ ID NO: 100,
SEQ ID NO: 101 and SEQ ID NO: 102,
SEQ ID NO: 105 and SEQ ID NO: 106,
SEQ ID NO: 111 and SEQ ID NO: 112,
SEQ ID NO: 113 and SEQ ID NO: 114,
SEQ ID NO: 115 and SEQ ID NO: 116,
SEQ ID NO: 119 and SEQ ID NO: 120,
SEQ ID NO: 121 and SEQ ID NO: 122,
SEQ ID NO: 219 and SEQ ID NO: 220,
SEQ ID NO: 221 and SEQ ID NO: 222,
SEQ ID NO: 223 and SEQ ID NO: 224,
SEQ ID NO: 225 and SEQ ID NO: 226,
SEQ ID NO: 227 and SEQ ID NO: 228,
SEQ ID NO: 229 and SEQ ID NO: 230,
SEQ ID NO: 231 and SEQ ID NO: 232, or
SEQ ID NO: 233 and SEQ ID NO: 234;
f. EGFR and DLL-4 and comprises
SEQ ID NO: 187 and SEQ ID NO: 188,
SEQ ID NO: 191 and SEQ ID NO: 192,
SEQ ID NO: 193 and SEQ ID NO: 194,
SEQ ID NO: 195 and SEQ ID NO: 196,
SEQ ID NO: 199 and SEQ ID NO: 200, or
SEQ ID NO: 201 and SEQ ID NO: 202;
g. EGFR and PLGF and comprises
SEQ ID NO: 203 and SEQ ID NO: 204,
SEQ ID NO: 207 and SEQ ID NO: 208,
SEQ ID NO: 209 and SEQ ID NO: 210,
SEQ ID NO: 211 and SEQ ID NO: 212,
SEQ ID NO: 213 and SEQ ID NO: 214,
SEQ ID NO: 215 and SEQ ID NO: 216, or
SEQ ID NO: 217 and SEQ ID NO: 218;
or
h. EGFR and EGFR and comprises
SEQ ID NO: 59 and SEQ ID NO: 60,
SEQ ID NO: 61 and SEQ ID NO: 62,
SEQ ID NO: 63 and SEQ ID NO: 64,
SEQ ID NO: 65 and SEQ ID NO: 66,
SEQ ID NO: 67 and SEQ ID NO: 68,
SEQ ID NO: 69 and SEQ ID NO: 70,
SEQ ID NO: 71 and SEQ ID NO: 72, or
SEQ ID NO: 73 and SEQ ID NO: 74.

48. The binding protein of claim 46, wherein the binding protein is capable of binding
a. EGFR and IGF1R and comprises
DVD805 (comprising SEQ ID NO: 147 and SEQ ID NO: 148),
DVD806 (comprising SEQ ID NO: 149 and SEQ ID NO: 150),
DVD835 (comprising SEQ ID NO: 151 and SEQ ID NO: 152), or
DVD836 (comprising SEQ ID NO: 153 and SEQ ID NO: 154);
b. EGFR and RON and comprises
DVD767 (comprising SEQ ID NO: 79 and SEQ ID NO: 80),
DVD768 (comprising SEQ ID NO: 81 and SEQ ID NO: 82),
DVD797 (comprising SEQ ID NO: 83 and SEQ ID NO: 84),
DVD798 (comprising SEQ ID NO: 85 and SEQ ID NO: 86), or
c. EGFR and HGF and comprises
DVD777 (comprising SEQ ID NO: 159 and SEQ ID NO: 160),
DVD778 (comprising SEQ ID NO: 161 and SEQ ID NO: 162),
DVD837 (comprising SEQ ID NO: 167 and SEQ ID NO: 168), or
DVD838 (comprising SEQ ID NO: 169 and SEQ ID NO: 170);
d. EGFR and VEGF and comprises
DVD839 (comprising SEQ ID NO: 183 and SEQ ID NO: 184),
DVD840 (comprising SEQ ID NO: 185 and SEQ ID NO: 186),
DVD789 (comprising SEQ ID NO: 239 and SEQ ID NO: 240),
DVD790 (comprising SEQ ID NO: 241 and SEQ ID NO: 242),
DVD819 (comprising SEQ ID NO: 243 and SEQ ID NO: 244),
DVD820 (comprising SEQ ID NO: 245 and SEQ ID NO: 246),
DVD849 (comprising SEQ ID NO: 247 and SEQ ID NO: 248),
DVD850 (comprising SEQ ID NO: 249 and SEQ ID NO: 250),
DVD791 (comprising SEQ ID NO: 255 and SEQ ID NO: 256),
DVD792 (comprising SEQ ID NO: 257 and SEQ ID NO: 258),
DVD821 (comprising SEQ ID NO: 259 and SEQ ID NO: 260),
DVD822 (comprising SEQ ID NO: 261 and SEQ ID NO: 262),
DVD851 (comprising SEQ ID NO: 263 and SEQ ID NO: 264), or
DVD852 (comprising SEQ ID NO: 265 and SEQ ID NO: 266);
e. EGFR and ErbB3 and comprises
DVD769 (comprising SEQ ID NO: 95 and SEQ ID NO: 96),
DVD770 (comprising SEQ ID NO: 97 and SEQ ID NO: 98),
DVD799 (comprising SEQ ID NO: 99 and SEQ ID NO: 100),
DVD800 (comprising SEQ ID NO: 101 and SEQ ID NO: 102),
DVD771 (comprising SEQ ID NO: 111 and SEQ ID NO: 112),
DVD772 (comprising SEQ ID NO: 113 and SEQ ID NO: 114),
DVD831 (comprising SEQ ID NO: 119 and SEQ ID NO; 120),
DVD832 (comprising SEQ ID NO: 121 and SEQ ID NO: 122),
DVD755 (comprising SEQ ID NO: 219 and SEQ ID NO: 220),
DVD756 (comprising SEQ ID NO: 221 and SEQ ID NO: 222),
DVD787 (comprising SEQ ID NO: 223 and SEQ ID NO: 224),
DVD788 (comprising SEQ ID NO: 225 and SEQ ID NO: 226),
DVD817 (comprising SEQ ID NO: 227 and SEQ ID NO: 228),
DVD818 (comprising SEQ ID NO: 229 and SEQ ID NO: 230),
DVD847 (comprising SEQ ID NO: 231 and SEQ ID NO: 232), or
DVD848 (comprising SEQ ID NO: 233 and SEQ ID NO: 234);
f. EGFR and DLL-4 and comprises
DVD781 (comprising SEQ ID NO: 191 and SEQ ID NO: 192),
DVD782 (comprising SEQ ID NO: 193 and SEQ ID NO: 194),
DVD841 (comprising SEQ ID NO: 199 and SEQ ID NO: 200), or
DVD842 (comprising SEQ ID NO: 201 and SEQ ID NO: 202);
g. EGFR and PLGF and comprises
DVD783 (comprising SEQ ID NO: 207 and SEQ ID NO: 208),
DVD784 (comprising SEQ ID NO: 209 and SEQ ID NO: 210),
DVD813 (comprising SEQ ID NO: 211 and SEQ ID NO: 212),
DVD814 (comprising SEQ ID NO: 213 and SEQ ID NO: 214),
DVD843 (comprising SEQ ID NO: 215 and SEQ ID NO: 216), or
DVD844 (comprising SEQ ID NO: 217 and SEQ ID NO: 218);
or
h. EGFR and EGFR and comprises
DVD321 (comprising SEQ ID NO: 59 and SEQ ID NO: 60),
DVD322 (comprising SEQ ID NO: 61 and SEQ ID NO: 62),
DVD765 (comprising SEQ ID NO: 63 and SEQ ID NO: 64),
DVD766 (comprising SEQ ID NO: 65 and SEQ ID NO: 66),
DVD795 (comprising SEQ ID NO: 67 and SEQ ID NO: 68),
DVD796 (comprising SEQ ID NO: 69 and SEQ ID NO: 70),
DVD825 (comprising SEQ ID NO: 71 and SEQ ID NO: 72), or
DVD826 (comprising SEQ ID NO: 73 and SEQ ID NO: 74).

49. The binding protein of claim 39, wherein the binding protein comprises two first polypeptide chains and two second polypeptide chains and four functional target binding sites.

50. The binding protein of claim 39, wherein the binding protein is a crystallized binding protein.

51. A binding protein conjugate comprising the binding protein of claim 39, the binding protein conjugate further comprising an immunoadhesion molecule, an imaging agent, a therapeutic agent, or a cytotoxic agent.

52. The binding protein conjugate of claim 51, wherein the imaging agent is a radiolabel, an enzyme, a fluorescent label, a luminescent label, a bioluminescent label, a magnetic label, or biotin.

53. The binding protein conjugate of claim 52, wherein the radiolabel is ³H, ¹⁴C, ³⁵S, ⁹⁰Y, ⁹⁹Tc, ¹¹¹In, ¹²⁵I, ¹³¹I, ¹⁷⁷Lu, ¹⁶⁶Ho, or ¹⁵³Sm.

54. The binding protein conjugate of claim 51, wherein the therapeutic or cytotoxic agent is an anti-metabolite, an alkylating agent, an antibiotic, a growth factor, a cytokine, an anti-angiogenic agent, an anti-mitotic agent, an anthracycline, a toxin, or an apoptotic agent.

55. A pharmaceutical composition comprising the binding protein of claim 39 and a pharmaceutically acceptable carrier.

56. The pharmaceutical composition of claim 55, further comprising at least one additional therapeutic agent.

57. The pharmaceutical composition of claim 56, wherein the additional therapeutic agent is selected from the group consisting of an imaging agent, a cytotoxic agent, an angiogenesis inhibitor, a kinase inhibitor, a co-stimulation molecule blocker, an adhesion molecule blocker, an anti-cytokine antibody or functional fragment thereof, methotrexate, cyclosporin, rapamycin, FK506, a detectable label or reporter, a TNF antagonist, an antirheumatic, a muscle relaxant, a narcotic, a non-steroid anti-inflammatory drug (NSAID), an analgesic, an anesthetic, a sedative, a local anesthetic, a neuromuscular blocker, an antimicrobial, an antipsoriatic, a corticosteroid, an anabolic steroid, an erythropoietin, an immunization, an immunoglobulin, an immunosuppressive, a growth hormone, a hormone replacement drug, a radiopharmaceutical, an antidepressant, an antipsychotic, a stimulant, an asthma medication, a beta agonist, an inhaled steroid, an epinephrine or analog, a cytokine, and a cytokine antagonist.

58. A method of treating a patient for a disease or a disorder comprising administering the binding protein of claim 39.

59. The method of claim 58, wherein the disease or the disorder is selected from the group consisting of rheumatoid arthritis, osteoarthritis, juvenile chronic arthritis, septic arthritis, Lyme arthritis, psoriatic arthritis, reactive arthritis, spondyloarthropathy, systemic lupus erythematosus, Crohn's disease, ulcerative colitis, inflammatory bowel disease, insulin dependent diabetes mellitus, thyroiditis, asthma, allergic diseases, psoriasis, dermatitis scleroderma, graft versus host disease, organ transplant rejection, acute or chronic immune disease associated with organ transplantation, sarcoidosis, atherosclerosis, disseminated intravascular coagulation, Kawasaki's disease, Grave's disease, nephrotic syndrome, chronic fatigue syndrome, Wegener's granulomatosis, Henoch-Schoenlein purpurea, microscopic vasculitis of the kidneys, chronic active hepatitis, uveitis, septic shock, toxic shock syndrome, sepsis syndrome, cachexia, infectious diseases, parasitic diseases, acquired immunodeficiency syndrome, acute transverse myelitis, Huntington's chorea, Parkinson's disease, Alzheimer's disease, stroke, primary biliary cirrhosis, hemolytic anemia, malignancies, heart failure, myocardial infarction, Addison's disease, sporadic, polyglandular deficiency type I and polyglandular deficiency type II, Schmidt's syndrome, adult (acute) respiratory distress syndrome, alopecia, alopecia greata, seronegative arthropathy, arthropathy, Reiter's disease, psoriatic arthropathy, ulcerative colitic arthropathy, enteropathic synovitis, chlamydia, atheromatous disease/arteriosclerosis, atopic allergy, autoimmune bullous disease, pemphigus vulgaris, pemphigus foliaceus, pemphigoid, linear IgA disease, autoimmune haemolytic anaemia, Coombs positive haemolytic anaemia, acquired pernicious anaemia, juvenile pernicious anaemia, myalgic encephalitis/Royal Free Disease, chronic mucocutaneous candidiasis, giant cell arteritis, primary sclerosing hepatitis, cryptogenic autoimmune hepatitis, acquired immunodeficiency disease syndrome, acquired immunodeficiency related diseases, hepatitis B, hepatitis C, common varied immunodeficiency (common variable hypogammaglobulinaemia), dilated cardiomyopathy, female infertility, ovarian failure, premature ovarian failure, fibrotic lung disease, cryptogenic fibrosing alveolitis, post-inflammatory interstitial lung disease, interstitial pneumonitis, connective tissue disease associated interstitial lung disease, mixed connective tissue disease associated lung disease, systemic sclerosis associated interstitial lung disease, rheumatoid arthritis associated interstitial lung disease, systemic lupus erythematosus associated lung disease, dermatomyositis/polymyositis associated lung disease, Sjögren's disease associated lung disease, ankylosing spondylitis associated lung disease, vasculitic diffuse lung disease, haemosiderosis associated lung disease, drug-induced interstitial lung disease, fibrosis, radiation fibrosis, bronchiolitis obliterans, chronic eosinophilic pneumonia, lymphocytic infiltrative lung disease, postinfectious interstitial lung disease, gouty arthritis, autoimmune hepatitis, type-1 autoimmune hepatitis (classical autoimmune or lupoid hepatitis), type-2 autoimmune hepatitis (anti-LKM antibody hepatitis), autoimmune mediated hypoglycaemia, type B insulin resistance with acanthosis nigricans, hypoparathyroidism, acute immune disease associated with organ transplantation, chronic immune disease associated with organ transplantation, osteoarthrosis, primary sclerosing cholangitis, psoriasis type 1, psoriasis type 2, idiopathic leucopaenia, autoimmune neutropaenia, renal disease NOS, glomerulonephritides, microscopic vasulitis of the kidneys, lyme disease, discoid lupus erythematosus, male infertility idiopathic or NOS, sperm autoimmunity, multiple sclerosis (all subtypes), sympathetic ophthalmia, pulmonary hypertension secondary to connective tissue disease, Goodpasture's syndrome, pulmonary manifestation of polyarteritis nodosa, acute rheumatic fever, rheumatoid spondylitis, Still's disease, systemic sclerosis, Sjörgren's syndrome, Takayasu's disease/arteritis, autoimmune thrombocytopaenia, idiopathic thrombocytopaenia, autoimmune thyroid disease, hyperthyroidism, goitrous autoimmune hypothyroidism (Hashimoto's disease), atrophic autoimmune hypothyroidism, primary myxoedema, phacogenic uveitis, primary vasculitis, vitiligo acute liver disease, chronic liver diseases, alcoholic cirrhosis, alcohol-induced liver injury, cholestasis, idiosyncratic liver disease, drug-induced hepatitis, non-alcoholic steatohepatitis, allergy and asthma, group B streptococci (GBS) infection, mental disorders, depression, schizophrenia, Th2 Type and Th1 Type mediated diseases, acute pain, chronic pain, cancer, lung cancer, breast cancer, stomach cancer, bladder cancer, colon cancer, pancreatic cancer, ovarian cancer, prostate cancer, rectal cancer, hematopoietic malignancies, leukemia, lymphoma, abetalipoprotemia, acrocyanosis, acute and chronic parasitic or infectious processes, acute leukemia, acute lymphoblastic leukemia (ALL), acute myeloid leukemia (AML), acute or chronic bacterial infection, acute pancreatitis, acute renal failure, adenocarcinomas, aerial ectopic beats, AIDS dementia complex, alcohol-induced hepatitis, allergic conjunctivitis, allergic contact dermatitis, allergic rhinitis, allograft rejection, alpha-1-antitrypsin deficiency, amyotrophic lateral sclerosis, anemia, angina pectoris, anterior horn cell degeneration, anti-CD3 therapy, antiphospholipid syndrome, anti-receptor hypersensitivity reactions, aortic and peripheral aneuryisms, aortic dissection, arterial hypertension, arteriosclerosis, arteriovenous fistula, ataxia, atrial fibrillation (sustained or paroxysmal), atrial flutter, atrioventricular block, B cell lymphoma, bone graft rejection, bone marrow transplant (BMT) rejection, bundle branch block, Burkitt's lymphoma, burns, cardiac arrhythmias, cardiac stun syndrome, cardiac tumors, cardiomyopathy, cardiopulmonary bypass inflammation response, cartilage transplant rejection, cerebellar cortical degenerations, cerebellar disorders, chaotic or multifocal atrial tachycardia, chemotherapy associated disorders, chronic myelocytic leukemia (CML), chronic alcoholism, chronic inflammatory pathologies, chronic lymphocytic leukemia (CLL), chronic obstructive pulmonary disease (COPD), chronic salicylate intoxication, colorectal carcinoma, congestive heart failure, conjunctivitis, contact dermatitis, cor pulmonale, coronary artery disease, Creutzfeldt-Jakob disease, culture negative sepsis, cystic fibrosis, cytokine therapy associated disorders, Dementia pugilistica, demyelinating diseases, dengue hemorrhagic fever, dermatitis, dermatologic conditions, diabetes, diabetes mellitus, diabetic aterioscierotic disease, diffuse Lewy body disease, dilated congestive cardiomyopathy, disorders of the basal ganglia, Down's syndrome in middle age, drug-induced movement disorders induced by drugs which block CNS dopamine receptors, drug sensitivity, eczema, encephalomyelitis, endocarditis, endocrinopathy, epiglottitis, Epstein-Barr virus infection, erythromelalgia, extrapyramidal and cerebellar disorders, familial hematophagocytic lymphohistiocytosis, fetal thymus implant rejection, Friedreich's ataxia, functional peripheral arterial disorders, fungal sepsis, gas gangrene, gastric ulcer, glomerular nephritis, graft rejection of any organ or tissue, gram negative sepsis, gram positive sepsis, granulomas due to intracellular organisms, hairy cell leukemia, Hallervorden-Spatz disease, Hashimoto's thyroiditis, hay fever, heart transplant rejection, hemachromatosis, hemodialysis, hemolytic uremic syndrome/thrombolytic thrombocytopenic purpura, hemorrhage, hepatitis A, His bundle arrythmias, HIV infection/HIV neuropathy, Hodgkin's disease, hyperkinetic movement disorders, hypersensitivity reactions, hypersensitivity pneumonitis, hypertension, hypokinetic movement disorders, hypothalamic-pituitary-adrenal axis evaluation, idiopathic Addison's disease, idiopathic pulmonary fibrosis, antibody mediated cytotoxicity, asthenia, infantile spinal muscular atrophy, inflammation of the aorta, influenza A, ionizing radiation exposure, iridocyclitis/uveitis/optic neuritis, ischemia-reperfusion injury, ischemic stroke, juvenile rheumatoid arthritis, juvenile spinal muscular atrophy, Kaposi's sarcoma, kidney transplant rejection, legionella, leishmaniasis, leprosy, lesions of the corticospinal system, lipedema, liver transplant rejection, lymphedema, malaria, malignant lymphoma, malignant histiocytosis, malignant melanoma, meningitis, meningococcemia, metabolic/idiopathic, migraine headache, mitochondrial multisystem disorder, mixed connective tissue disease, monoclonal gammopathy, multiple myeloma, multiple systems degenerations, Mencel Dejerine-Thomas Shi-Drager degeneration, Machado-Joseph degeneration, myasthenia gravis, mycobacterium avium intracellulare, mycobacterium tuberculosis, myelodyplastic syndrome, myocardial infarction, myocardial ischemic disorders, nasopharyngeal carcinoma, neonatal chronic lung disease, nephritis, nephrosis, neurodegenerative diseases, neurogenic muscular atrophies, neutropenic fever, Non-Hodgkin's lymphoma, occlusion of the abdominal aorta and its branches, occulsive arterial disorders, OKT3 therapy, orchitis/epidydimitis, orchitis/vasectomy reversal procedures, organomegaly, osteoporosis, pancreas transplant rejection, pancreatic carcinoma, paraneoplastic syndrome/hypercalcemia of malignancy, parathyroid transplant rejection, pelvic inflammatory disease, perennial rhinitis, pericardial disease, peripheral arteriosclerotic disease, peripheral vascular disorders, peritonitis, pernicious anemia, pneumocystis carinii pneumonia, pneumonia, POEMS syndrome, polyneuropathy, organomegaly, endocrinopathy, monoclonal gammopathy, skin changes syndrome, post perfusion syndrome, post pump syndrome, post-MI cardiotomy syndrome, preeclampsia, progressive supranuclear palsy, primary pulmonary hypertension, radiation therapy. Raynaud's phenomenon and disease, Raynoud's disease, Refsum's disease, regular narrow QRS tachycardia, renovascular hypertension, reperfusion injury, restrictive cardiomyopathy, sarcomas, scleroderma, senile chorea, senile dementia of Lewy body type, seronegative arthropathies, shock, sickle cell anemia, skin allograft rejection, skin changes syndrome, small bowel transplant rejection, solid tumors, specific arrythmias, spinal ataxia, spinocerebellar degenerations, streptococcal myositis, structural lesions of the cerebellum, subacute sclerosing panencephalitis, Syncope, syphilis of the cardiovascular system, systemic anaphalaxis, systemic inflammatory response syndrome, systemic onset juvenile rheumatoid arthritis, T-cell or FAB ALL, telangiectasia, thromboangitis obliterans, thrombocytopenia, toxicity, transplants, trauma/hemorrhage, type III hypersensitivity reactions, type IV hypersensitivity, unstable angina, uremia, urosepsis, urticaria, valvular heart diseases, varicose veins, vasculitis, venous diseases, venous thrombosis, ventricular fibrillation, viral and fungal infections, viral encephalitis/aseptic meningitis, viral-associated hemaphagocytic syndrome, Wernicke-Korsakoff syndrome, Wilson's disease, xenograft rejection of any organ or tissue, acute coronary syndromes, acute idiopathic polyneuritis, acute inflammatory demyelinating polyradiculoneuropathy, acute ischemia, adult Still's disease, alopecia greata, anaphylaxis, anti-phospholipid antibody syndrome, aplastic anemia, arteriosclerosis, atopic eczema, atopic dermatitis, autoimmune dermatitis, autoimmune disorder associated with streptococcus infection, autoimmune enteropathy, autoimmune hearing loss, autoimmune lymphoproliferative syndrome (ALPS), autoimmune myocarditis, autoimmune premature ovarian failure, blepharitis, bronchiectasis, bullous pemphigoid, cardiovascular disease, catastrophic antiphospholipid syndrome, celiac disease, cervical spondylosis, chronic ischemia, cicatricial pemphigoid, clinically isolated syndrome (cis) with risk for multiple sclerosis, conjunctivitis, childhood onset psychiatric disorder, dacryocystitis, dermatomyositis, diabetic retinopathy, diabetes mellitus, disk herniation, disk prolapse, drug induced immune hemolytic anemia, endocarditis, endometriosis, endophthalmitis, episcleritis, erythema multiforme, erythema multiforme major, gestational pemphigoid, Guillain-Barré syndrome (GBS), hay fever, Hughes syndrome, idiopathic Parkinson's disease, idiopathic interstitial pneumonia, IgE-mediated allergy, immune hemolytic anemia, inclusion body myositis, infectious ocular inflammatory disease, inflammatory demyelinating disease, inflammatory heart disease, inflammatory kidney disease, IPF/UIP, iritis, keratitis, keratoconjunctivitis sicca, Kussmaul disease or Kussmaul-Meier disease, Landry's paralysis, Langerhan's cell histiocytosis, livedo reticularis, macular degeneration, microscopic polyangiitis, morbus bechterev, motor neuron disorders, mucous membrane pemphigoid, multiple organ failure, myasthenia gravis, myelodysplastic syndrome, myocarditis, nerve root disorders, neuropathy, non-A non-B hepatitis, optic neuritis, osteolysis, pauciarticular JRA, peripheral artery occlusive disease (PAOD), peripheral vascular disease (PVD), peripheral artery, disease (PAD), phlebitis, polyarteritis nodosa, periarteritis nodosa, polychondritis, polymyalgia rheumatica, poliosis, polyarticular JRA, polyendocrine deficiency syndrome, polymyositis, polymyalgia rheumatica (PMR), post-pump syndrome, primary Parkinsonism, prostatitis, pure red cell aplasia, primary adrenal insufficiency, recurrent neuromyelitis optica, restenosis, rheumatic heart disease, sapho (synovitis, acne, pustulosis, hyperostosis, and osteitis), scleroderma, secondary amyloidosis, shock lung, scleritis, sciatica, secondary adrenal insufficiency, silicone associated connective tissue disease, sneddon-wilkinson dermatosis, spondilitis ankylosans, Stevens-Johnson syndrome (SJS), systemic inflammatory response syndrome, temporal arteritis, toxoplasmic retinitis, toxic epidermal necrolysis, transverse myelitis, TRAPS (tumor necrosis factor receptor, type 1 allergic reaction, type II diabetes, urticaria, usual interstitial pneumonia (UIP), vasculitis, vernal conjunctivitis, viral retinitis, Vogt-Koyanagi-Harada syndrome (VKH syndrome), wet macular degeneration, wound healing, yersinia, and salmonella associated arthropathy.

60. The method of claim 58, wherein the binding protein is adapted for parenteral, subcutaneous, intramuscular, intravenous, intrarticular, intrabronchial, intraabdominal, intracapsular, intracartilaginous, intracavitary, intracelial, intracerebellar, intracerebroventricular, intracolic, intracervical, intragastric, intrahepatic, intramyocardial, intraosteal, intrapelvic, intrapericardiac, intraperitoneal, intrapleural, intraprostatic, intrapulmonary, intrarectal, intrarenal, intraretinal, intraspinal, intrasynovial, intrathoracic, intrauterine, intravesical, bolus, vaginal, rectal, buccal, sublingual, intranasal, or transdermal administration.

61. An isolated nucleic acid encoding the binding protein of claim 39.

62. A vector comprising the isolated nucleic acid of claim 61.

63. The vector of claim 62, wherein the vector is selected from the group consisting of pcDNA™, pTT, pTT3, pEFBOS, pBV, pJV, pcDNA3.1™ TOPO™, pEF6 TOPO™, and pBJ.

64. A host cell comprising the vector of claim 62.

65. The host cell of claim 64, wherein the host cell is selected from the group consisting of a prokaryotic cell, an Escherichia coli cell, a eukaryotic cell, an animal cell, a plant cell, a fungal cell, a mammalian cell, an avian cell, an insect cell, a CHO cell, a COS cell, a yeast cell, a Saccharomyces cerevisiae cell, and an Sf9 cell.

66. A method of producing a binding protein, comprising culturing the host cell of claim 64 under conditions sufficient to produce the binding protein.

67. A method of determining the presence, amount, or concentration of at least one target selected from the group consisting of EGFR, IGF1R, RON, HGF, VEGF, ErbB3, DLL-4, and PLGF, or fragment thereof, in a test sample by an immunoassay,
wherein the immunoassay comprises contacting the test sample with at least one binding protein and at least one detectable label, and
wherein the at least one binding protein comprises the binding protein of claim 39.

68. The method of claim 67, further comprising a, contacting the test sample with the at least one binding protein, wherein the binding protein binds to an epitope on the target or fragment thereof so as to form a first complex;
b. contacting the complex with the at least one detectable label, wherein the detectable label binds to the binding protein or an epitope on the target or fragment thereof that is not bound by the binding protein to form a second complex; and
c. detecting the presence, amount, or concentration of the target or fragment thereof in the test sample based on the signal generated by the detectable label in the second complex, wherein the presence, amount, or concentration of the target or fragment thereof is directly correlated with the signal generated by the detectable label.

69. The method of claim 67, further comprising
a. contacting the test sample with the at least one binding protein, wherein the binding protein binds to an epitope on the target or fragment thereof so as to form a first complex;
b. contacting the complex with the at least one detectable label, wherein the detectable label competes with the target or fragment thereof for binding to the binding protein so as to form a second complex; and
c. detecting the presence, amount, or concentration of the target or fragment thereof in the test sample based on the signal generated by the detectable label in the second complex, wherein the presence, amount, or concentration of the target or fragment thereof is indirectly correlated with the signal generated by the detectable label.

70. A kit for assaying a test sample for the presence, amount, or concentration of at least one target selected from the group consisting of EGFR, IGF1R, RON, HGF, VEGF, ErbB3, DLL-4, and PLGF, or fragment thereof, wherein the kit comprises
a. instructions for assaying the test sample for the target or fragment thereof, and
b. at least one binding protein comprising the binding protein of claim 39.

The application's sequence listing, which the Patent Office published only in electronic form, follows.

SEQUENCE LISTING (331 sequences)

SEQ ID NO: 1 - protein, 16 aa, Artificial Sequence
  Description of Artificial Sequence: Synthetic peptide
AKTTPKLEEGEFSEAR

SEQ ID NO: 2 - protein, 17 aa, Artificial Sequence
  Description of Artificial Sequence: Synthetic peptide
AKTTPKLEEGEFSEARV

SEQ ID NO: 3 - protein, 9 aa, Artificial Sequence
  Description of Artificial Sequence: Synthetic peptide
AKTTPKLGG

SEQ ID NO: 4 - protein, 10 aa, Artificial Sequence
  Description of Artificial Sequence: Synthetic peptide
SAKTTPKLGG

SEQ ID NO: 5 - protein, 6 aa, Artificial Sequence
  Description of Artificial Sequence: Synthetic peptide
SAKTTP

SEQ ID NO: 6 - protein, 6 aa, Artificial Sequence
  Description of Artificial Sequence: Synthetic peptide
RADAAP

SEQ ID NO: 7 - protein, 9 aa, Artificial Sequence
  Description of Artificial Sequence: Synthetic peptide
RADAAPTVS

SEQ ID NO: 8 - protein, 12 aa, Artificial Sequence
  Description of Artificial Sequence: Synthetic peptide
RADAAAAGGPGS

SEQ ID NO: 9 - protein, 27 aa, Artificial Sequence
  Description of Artificial Sequence: Synthetic peptide
RADAAAAGGGGSGGGGSGGGGSGGGGS

SEQ ID NO: 10 - protein, 18 aa, Artificial Sequence
  Description of Artificial Sequence: Synthetic peptide
SAKTTPKLEEGEFSEARV

SEQ ID NO: 11 - protein, 5 aa, Artificial Sequence
  Description of Artificial Sequence: Synthetic peptide
ADAAP

SEQ ID NO: 12 - protein, 12 aa, Artificial Sequence
  Description of Artificial Sequence: Synthetic peptide
ADAAPTVSIFPP

SEQ ID NO: 13 - protein, 5 aa, Artificial Sequence
  Description of Artificial Sequence: Synthetic peptide
TVAAP

SEQ ID NO: 14 - protein, 12 aa, Artificial Sequence
  Description of Artificial Sequence: Synthetic peptide
TVAAPSVFIFPP

SEQ ID NO: 15 - protein, 6 aa, Artificial Sequence
  Description of Artificial Sequence: Synthetic peptide
QPKAAP

SEQ ID NO: 16 - protein, 13 aa, Artificial Sequence
  Description of Artificial Sequence: Synthetic peptide
QPKAAPSVTLFPP

SEQ ID NO: 17 - protein, 6 aa, Artificial Sequence
  Description of Artificial Sequence: Synthetic peptide
AKTTPP

SEQ ID NO: 18 - protein, 13 aa, Artificial Sequence
  Description of Artificial Sequence: Synthetic peptide
AKTTPPSVTPLAP

SEQ ID NO: 19 - protein, 6 aa, Artificial Sequence
  Description of Artificial Sequence: Synthetic peptide
AKTTAP

SEQ ID NO: 20 - protein, 13 aa, Artificial Sequence
  Description of Artificial Sequence: Synthetic peptide
AKTTAPSVYPLAP

SEQ ID NO: 21 - protein, 6 aa, Artificial Sequence
  Description of Artificial Sequence: Synthetic peptide
ASTKGP

SEQ ID NO: 22 - protein, 13 aa, Artificial Sequence
  Description of Artificial Sequence: Synthetic peptide
ASTKGPSVFPLAP

SEQ ID NO: 23 - protein, 15 aa, Artificial Sequence
  Description of Artificial Sequence: Synthetic peptide
GGGGSGGGGSGGGGS

SEQ ID NO: 24 - protein, 15 aa, Artificial Sequence
  Description of Artificial Sequence: Synthetic peptide
GENKVEYAPALMALS

SEQ ID NO: 25 - protein, 15 aa, Artificial Sequence
  Description of Artificial Sequence: Synthetic peptide
GPAKELTPLKEAKVS

SEQ ID NO: 26 - protein, 15 aa, Artificial Sequence
  Description of Artificial Sequence: Synthetic peptide
GHEAAAVMQVQYPAS

SEQ ID NO: 27 - protein, 119 aa, Artificial Sequence [sequence omitted]

SEQ ID NO: 28 - protein, 107 aa, Artificial Sequence
  Description of Artificial Sequence: Synthetic polypeptide
QIVLTQSPAIMSASPGEKVTMTCRASSSVSYMNWYQQKSGTSPKRWIYDTSKVASGVPYRFSGSGSGTSYSLTISSMEAEDAATYYCQQWSSNPLTFGSGTKLEINR

SEQ ID NO: 29 - protein, 124 aa, Artificial Sequence
  Description of Artificial Sequence: Synthetic polypeptide
EVQLVQSGGGLVKPGGSLRLSCAASGFTFSSYAMHWVRQAPGKGLEWVAVISYDGSNKYYADSVKGRFTISRDNSKNTLYLQMNSLRAEDTAVYYCARFSGWPNNYYYYGMDVWGQGTTVTVSS

SEQ ID NO: 30 - protein, 114 aa, Artificial Sequence
  Description of Artificial Sequence: Synthetic polypeptide
DVVMTQSPLSLPVTPGEPASISCRSSQSLLHSNGFNYVDWYLQKPGQSPHLLIYFGSYRASGVPDRFSGSGSGTDFTLKISRVEAEDVGVYYCMQALQTPPWTFGQGTKVEIRR

SEQ ID NO: 31 - protein, 125 aa, Artificial Sequence [sequence omitted]

SEQ ID NO: 32 - protein, 108 aa, Artificial Sequence
  Description of Artificial Sequence: Synthetic polypeptide
DIQMTQFPSSLSASVGDRVTITCRASQGIRNDLGWYQQKPGKAPKRLIYAASRLHRGVPSRFSGSGSGTEFTLTISSLQPEDFATYYCLQHNSYPCSFGQGTKLEIKR

SEQ ID NO: 33 - protein, 122 aa, Artificial Sequence
  Description of Artificial Sequence: Synthetic polypeptide
QVQLVESGGGLVKPGGSLRLSCAASGFTFSDYYMSWIRQAPGKGLEWVSYISSSGSTIYYADSVKGRFTISRDNAKNSLYLQMNSLRAEDTAVYYCARDEYNSGWYVLFDYWGQGTLVTVSS

SEQ ID NO: 34 - protein, 108 aa, Artificial Sequence
  Description of Artificial Sequence: Synthetic polypeptide
DIQMTQSPSSVSASVGDRVTITCRASQGISSWLAWYQQKPGKAPNLLIYEASSLQSGVPSRFGGSGSGTDFTLTISSLQPEDFATYYCQQANGFPWTFGQGTKVEIKR

SEQ ID NO: 35 - protein, 123 aa, Artificial Sequence [sequence omitted]

SEQ ID NO: 36 - protein, 108 aa, Artificial Sequence
  Description of Artificial Sequence: Synthetic polypeptide
DIQMTQSPSSLSASVGDRVTITCSASQDISNYLNWYQQKPGKAPKVLIYFTSSLHSGVPSRFSGSGSGTDFTLTISSLQPEDFATYYCQQYSTVPWTFGQGTKVEIKR

SEQ ID NO: 37 - protein, 118 aa, Artificial Sequence
  Description of Artificial Sequence: Synthetic polypeptide
EVQLVESGGGLVQPGGSLRLSCAASGFTFTDNWISWVRQAPGKGLEWVGYISPNSGFTYYADSVKGRFTISADTSKNTAYLQMNSLRAEDTAVYYCARDNFGGYFDYWGQGTLVTVSS

SEQ ID NO: 38 - protein, 109 aa, Artificial Sequence
  Description of Artificial Sequence: Synthetic polypeptide
DIQMTQSPSSLSASVGDRVTITCRASQDVSTAVAWYQQKPGKAPKLLIYSASFLYSGVPSRFSGSGSGTDFTLTISSLQPEDFATTYYCQQSYTGTVTFGQGTKVEIKR

SEQ ID NO: 39 - protein, 119 aa, Artificial Sequence
  Description of Artificial Sequence: Synthetic polypeptide
QVQLKQSGPGLVQPSQSLSITCTVSGFSLTNYGVHWVRQSPGKGLEWLGVIWSGGNTDYNTPFTSRLSINKDNSKSQVFFKMNSLQSNDTAIYYCARALTYYDYEFAYWGQGTLVTVSA

SEQ ID NO: 40 - protein, 108 aa, Artificial Sequence
  Description of Artificial Sequence: Synthetic polypeptide
DILLTQSPVILSVSPGERVSFSCRASQSIGTNIHWYQQRTNGSPRLLIKYASESISGIPSRFSGSGSGTDFTLSINSVESEDIADYYCQQNNNWPTTFGAGTKLELKR

SEQ ID NO: 41 - protein, 116 aa, Artificial Sequence
  Description of Artificial Sequence: Synthetic polypeptide
QVQLQQSGAELVKPGASVKISCKASGYTFTDYYINWVKLAPGQGLEWIGWIYPGSGNTKYNEKFKGKATLTIDTSSSTAYMQLSSLTSEDTAVYFCVRDSPFFDYWGQGTLLTVSS

SEQ ID NO: 42 - protein, 113 aa, Artificial Sequence
  Description of Artificial Sequence: Synthetic polypeptide
DIVLTQSPDSLAVSLGERVTMNCKSSQSLLNSGMRKSFLAWYQQKPGQSPKLLIYWASTRESGVPDRFTGSGSGTDFTLTISSVQAEDVAVYYCKQSYHLFTFGSGTKLEIKR

SEQ ID NO: 43 - protein, 115 aa, Artificial Sequence
  Description of Artificial Sequence: Synthetic polypeptide
EVQLVESGGGLVQPGSSLKLSCVASGFTFSNYGMNWIRQAPKKGLEWIGMIYYDSSEKHYADSVKGRFTISRDNSKNTLYLEMNSLRSEDTAIYYCAKGTTPDYWGQGVMVTVSS

SEQ ID NO: 44 - protein, 113 aa, Artificial Sequence
  Description of Artificial Sequence: Synthetic polypeptide
DVVLTQTPVSLSVTLGDQASMSCRSSQSLEYSDGYTFLEWFLQKPGQSPQLLIYEVSNRFSGVPDRFIGSGSGTDFTLKISRVEPEDLGVYYCFQATHDPLTFGSGTKLEIKR

SEQ ID NO: 45 - protein, 117 aa, Artificial Sequence [sequence omitted]

SEQ ID NO: 46 - protein, 114 aa, Artificial Sequence
  Description of Artificial Sequence: Synthetic polypeptide
DIEMTQSPDSLAVSLGERATINCRSSQSVLYSSSNRNYLAWYQQNPGQPPKLLIYWASTRESGVPDRFSGSGSGTDFTLTISSLQAEDVAVYYCQQYYSTPRTFGQGTKVEIKR

SEQ ID NO: 47 - protein, 119 aa, Artificial Sequence
  Description of Artificial Sequence: Synthetic polypeptide
EVQLVESGGGLVQPGGSLRLSCAASGFTFSIYSMNWVRQAPGKGLEWVSYISSSSSTIYYADSVKGRFTISRDNAKNSLYLQMNSLRDEDTAVYYCARDRGDFDAFDIWGQGTMVTVSS

SEQ ID NO: 48 - protein, 108 aa, Artificial Sequence
  Description of Artificial Sequence: Synthetic polypeptide
DIQMTQSPSSLSASVGDRVTITCQASQDITNYLNWYQQKPGKAPKLLIYDASNLETGVPSRFSGSGSGTDFTFTISSLQPEDIATYNCQQCENFPITFGQGTRLEIKR

SEQ ID NO: 49 - protein, 116 aa, Artificial Sequence
  Description of Artificial Sequence: Synthetic polypeptide
QVQLQESGPGLVKPSQTLSLTCTVSGYSISSDFAWNWIRQPPGKGLEWMGYISYSGNTRYQPSLKSRITISRDTSKNQFFLKLNSVTAADTATYYCVTAGRGFPYWGQGTLVTVSS

SEQ ID NO: 50 - protein, 108 aa, Artificial Sequence
  Description of Artificial Sequence: Synthetic polypeptide
DIQMTQSPSSMSVSVGDRVTITCHSSQDINSNIGWLQQKPGKSFKGLIYHGTNLDDGVPSRFSGSGSGTDYTLTISSLQPEDFATYYCVQYAQFPWTFGGGTKLEIKR

SEQ ID NO: 51 - protein, 119 aa, Artificial Sequence [sequence omitted]

SEQ ID NO: 52 - protein, 112 aa, Artificial Sequence
  Description of Artificial Sequence: Synthetic polypeptide
QSALTQPASVSGSPGQSITISCTGTSSDVGSYNVVSWYQQHPGKAPKLIIYEVSQRPSGVSNRFSGSKSGNTASLTISGLQTEDEADYYCCSYAGSSIFVIFGGGTKVTVLG

SEQ ID NO: 53 - protein, 120 aa, Artificial Sequence
  Description of Artificial Sequence: Synthetic polypeptide
EVQLVESGGGLVQPGGSLRLSCAASGFTISDYWIHWVRQAPGKGLEWVAGITPAGGYTYYADSVKGRFTISADTSKNTAYLQMNSLRAEDTAVYYCARFVFFLPYAMDYWGQGTLVTVSS

SEQ ID NO: 54 - protein, 108 aa, Artificial Sequence
  Description of Artificial Sequence: Synthetic polypeptide
DIQMTQSPSSLSASVGDRVTITCRASQDVSTAVAWYQQKPGKAPKLLIYSASFLYSGVPSRFSGSGSGTDFTLTISSLQPEDFATYYCQQSYTTPPTFGQGTKVEIKR

SEQ ID NO: 55 - protein, 121 aa, Artificial Sequence
  Description of Artificial Sequence: Synthetic polypeptide
EVQLVESGGGLVQPGGSLRLSCAASGFTINASWIHWVRQAPGKGLEWVGAIYPYSGYTNYADSVKGRFTISADTSKNTAYLQMNSLRAEDTAVYYCARWGHSTSPWAMDYWGQGTLVTVSS

SEQ ID NO: 56 - protein, 108 aa, Artificial Sequence
  Description of Artificial Sequence: Synthetic polypeptide
DIQMTQSPSSLSASVGDRVTITCRASQVIRRSLAWYQQKPGKAPKLLIYAASNLASGVPSRFSGSGSGTDFTLTISSLQPEDFATYYCQQSNTSPLTFGQGTKVEIKR

SEQ ID NO: 57 - protein, 115 aa, Artificial Sequence; identical to SEQ ID NO: 43
  Description of Artificial Sequence: Synthetic polypeptide

SEQ ID NO: 58 - protein, 113 aa, Artificial Sequence; identical to SEQ ID NO: 44
  Description of Artificial Sequence: Synthetic polypeptide

SEQ ID NO: 59 - protein, 241 aa, Artificial Sequence
  Description of Artificial Sequence: Synthetic polypeptide
QVQLQESGPGLVKPSQTLSLTCTVSGYSISSDFAWNWIRQPPGKGLEWMGYISYSGNTRYQPSLKSRITISRDTSKNQFFLKLNSVTAADTATYYCVTAGRGFPYWGQGTLVTVSSASTKGPQVQLKQSGPGLVQPSQSLSITCTVSGFSLTNYGVHWVRQSPGKGLEWLGVIWSGGNTDYNTPFTSRLSINKDNSKSQVFFKMNSLQSNDTAIYYCARALTYYDYEFAYWGQGTLVTVSA

SEQ ID NO: 60 - protein, 221 aa, Artificial Sequence
  Description of Artificial Sequence: Synthetic polypeptide
DIQMTQSPSSMSVSVGDRVTITCHSSQDINSNIGWLQQKPGKSFKGLIYHGTNLDDGVPSRFSGSGSGTDYTLTISSLQPEDFATYYCVQYAQFPWTFGGGTKLEIKRTVAAPDILLTQSPVILSVSPGERVSFSCRASQSIGTNIHWYQQRTNGSPRLLIKYASESISGIPSRFSGSGSGTDFTLSINSVESEDIADYYCQQNNNWPTTFGAGTKLELKR

SEQ ID NO: 61 - protein, 241 aa, Artificial Sequence
  Description of Artificial Sequence: Synthetic polypeptide
QVQLKQSGPGLVQPSQSLSITCTVSGFSLTNYGVHWVRQSPGKGLEWLGVIWSGGNTDYNTPFTSRLSINKDNSKSQVFFKMNSLQSNDTAIYYCARALTYYDYEFAYWGQGTLVTVSAASTKGPQVQLQESGPGLVKPSQTLSLTCTVSGYSISSDFAWNWIRQPPGKGLEWMGYISYSGNTRYQPSLKSRITISRDTSKNQFFLKLNSVTAADTATYYCVTAGRGFPYWGQGTLVTVSS

SEQ ID NO: 62 - protein, 221 aa, Artificial Sequence
  Description of Artificial Sequence: Synthetic polypeptide
DILLTQSPVILSVSPGERVSFSCRASQSIGTNIHWYQQRTNGSPRLLIKYASESISGIPSRFSGSGSGTDFTLSINSVESEDIADYYCQQNNNWPTTFGAGTKLELKRTVAAPDIQMTQSPSSMSVSVGDRVTITCHSSQDINSNIGWLQQKPGKSFKGLIYHGTNLDDGVPSRFSGSGSGTDYTLTISSLQPEDFATYYCVQYAQFPWTFGGGTKLEIKR

SEQ ID NO: 63 - protein, 248 aa, Artificial Sequence
  Description of Artificial Sequence: Synthetic polypeptide
QVQLQESGPGLVKPSQTLSLTCTVSGYSISSDFAWNWIRQPPGKGLEWMGYISYSGNTRYQPSLKSRITISRDTSKNQFFLKLNSVTAADTATYYCVTAGRGFPYWGQGTLVTVSSASTKGPSVFPLAPQVQLKQSGPGLVQPSQSLSITCTVSGFSLTNYGVHWVRQSPGKGLEWLGVIWSGGNTDYNTPFTSRLSINKDNSKSQVFFKMNSLQSNDTAIYYCARALTYYDYEFAYWGQGTLVTVSA

SEQ ID NO: 64 - protein, 228 aa, Artificial Sequence
  Description of Artificial Sequence: Synthetic polypeptide
DIQMTQSPSSMSVSVGDRVTITCHSSQDINSNIGWLQQKPGKSFKGLIYHGTNLDDGVPSRFSGSGSGTDYTLTISSLQPEDFATYYCVQYAQFPWTFGGGTKLEIKRTVAAPSVFIFPPDILLTQSPVILSVSPGERVSFSCRASQSIGTNIHWYQQRTNGSPRLLIKYASESISGIPSRFSGSGSGTDFTLSINSVESEDIADYYCQQNNNWPTTFGAGTKLELKR

SEQ ID NO: 65 - protein, 248 aa, Artificial Sequence
  Description of Artificial Sequence: Synthetic polypeptide
QVQLKQSGPGLVQPSQSLSITCTVSGFSLTNYGVHWVRQSPGKGLEWLGVIWSGGNTDYNTPFTSRLSINKDNSKSQVFFKMNSLQSNDTAIYYCARALTYYDYEFAYWGQGTLVTVSAASTKGPSVFPLAPQVQLQESGPGLVKPSQTLSLTCTVSGYSISSDFAWNWIRQPPGKGLEWMGYISYSGNTRYQPSLKSRITISRDTSKNQFFLKLNSVTAADTATYYCVTAGRGFPYWGQGTLVTVSS

SEQ ID NO: 66 - protein, 228 aa, Artificial Sequence
  Description of Artificial Sequence: Synthetic polypeptide
DILLTQSPVILSVSPGERVSFSCRASQSIGTNIHWYQQRTNGSPRLLIKYASESISGIPSRFSGSGSGTDFTLSINSVESEDIADYYCQQNNNWPTTFGAGTKLELKRTVAAPSVFIFPPDIQMTQSPSSMSVSVGDRVTITCHSSQDINSNIGWLQQKPGKSFKGLIYHGTNLDDGVPSRFSGSGSGTDYTLTISSLQPEDFATYYCVQYAQFPWTFGGGTKLEIKR

SEQ ID NO: 67 - protein, 248 aa, Artificial Sequence; identical to SEQ ID NO: 63
  Description of Artificial Sequence: Synthetic polypeptide

SEQ ID NO: 68 - protein, 221 aa, Artificial Sequence; identical to SEQ ID NO: 60
  Description of Artificial Sequence: Synthetic polypeptide

SEQ ID NO: 69 - protein, 248 aa, Artificial Sequence; identical to SEQ ID NO: 65
  Description of Artificial Sequence: Synthetic polypeptide

SEQ ID NO: 70 - protein, 221 aa, Artificial Sequence; identical to SEQ ID NO: 62
  Description of Artificial Sequence: Synthetic polypeptide

SEQ ID NO: 71 - protein, 241 aa, Artificial Sequence; identical to SEQ ID NO: 59
  Description of Artificial Sequence: Synthetic polypeptide

SEQ ID NO: 72 - protein, 228 aa, Artificial Sequence; identical to SEQ ID NO: 64
  Description of Artificial Sequence: Synthetic polypeptide

SEQ ID NO: 73 - protein, 241 aa, Artificial Sequence; identical to SEQ ID NO: 61
  Description of Artificial Sequence: Synthetic polypeptide

SEQ ID NO: 74 - protein, 228 aa, Artificial Sequence; identical to SEQ ID NO: 66
  Description of Artificial Sequence: Synthetic polypeptide

SEQ ID NO: 75 - protein, 246 aa, Artificial Sequence
  Description of Artificial Sequence: Synthetic polypeptide
QVQLQESGPGLVKPSQTLSLTCTVSGYSISSDFAWNWIRQPPGKGLEWMGYISYSGNTRYQPSLKSRITISRDTSKNQFFLKLNSVTAADTATYYCVTAGRGFPYWGQGTLVTVSSASTKGPEVQLVQSGGGLVKPGGSLRLSCAASGFTFSSYAMHWVRQAPGKGLEWVAVISYDGSNKYYADSVKGRFTISRDNSKNTLYLQMNSLRAEDTAVYYCARFSGWPNNYYYYGMDVWGQGTTVTVSS

SEQ ID NO: 76 - protein, 227 aa, Artificial Sequence
  Description of Artificial Sequence: Synthetic polypeptide
DIQMTQSPSSMSVSVGDRVTITCHSSQDINSNIGWLQQKPGKSFKGLIYHGTNLDDGVPSRFSGSGSGTDYTLTISSLQPEDFATYYCVQYAQFPWTFGGGTKLEIKRTVAAPDVVMTQSPLSLPVTPGEPASISCRSSQSLLHSNGFNYVDWYLQKPGQSPHLLIYFGSYRASGVPDRFSGSGSGTDFTLKISRVEAEDVGVYYCMQALQTPPWTFGQGTKVEIRR

SEQ ID NO: 77 - protein, 246 aa, Artificial Sequence
  Description of Artificial Sequence: Synthetic polypeptide
EVQLVQSGGGLVKPGGSLRLSCAASGFTFSSYAMHWVRQAPGKGLEWVAVISYDGSNKYYADSVKGRFTISRDNSKNTLYLQMNSLRAEDTAVYYCARFSGWPNNYYYYGMDVWGQGTTVTVSSASTKGPQVQLQESGPGLVKPSQTLSLTCTVSGYSISSDFAWNWIRQPPGKGLEWMGYISYSGNTRYQPSLKSRITISRDTSKNQFFLKLNSVTAADTATYYCVTAGRGFPYWGQGTLVTVSS

SEQ ID NO: 78 - protein, 227 aa, Artificial Sequence
  Description of Artificial Sequence: Synthetic polypeptide
DVVMTQSPLSLPVTPGEPASISCRSSQSLLHSNGFNYVDWYLQKPGQSPHLLIYFGSYRASGVPDRFSGSGSGTDFTLKISRVEAEDVGVYYCMQALQTPPWTFGQGTKVEIRRTVAAPDIQMTQSPSSMSVSVGDRVTITCHSSQDINSNIGWLQQKPGKSFKGLIYHGTNLDDGVPSRFSGSGSGTDYTLTISSLQPEDFATYYCVQYAQFPWTFGGGTKLEIKR

SEQ ID NO: 79 - protein, 253 aa, Artificial Sequence
  Description of Artificial Sequence: Synthetic polypeptide
QVQLQESGPGLVKPSQTLSLTCTVSGYSISSDFAWNWIRQPPGKGLEWMGYISYSGNTRYQPSLKSRITISRDTSKNQFFLKLNSVTAADTATYYCVTAGRGFPYWGQGTLVTVSSASTKGPSVFPLAPEVQLVQSGGGLVKPGGSLRLSCAASGFTFSSYAMHWVRQAPGKGLEWVAVISYDGSNKYYADSVKGRFTISRDNSKNTLYLQMNSLRAEDTAVYYCARFSGWPNNYYYYGMDVWGQGTTVTVSS

SEQ ID NO: 80 - protein, 234 aa, Artificial Sequence
  Description of Artificial Sequence: Synthetic polypeptide
DIQMTQSPSSMSVSVGDRVTITCHSSQDINSNIGWLQQKPGKSFKGLIYHGTNLDDGVPSRFSGSGSGTDYTLTISSLQPEDFATYYCVQYAQFPWTFGGGTKLEIKRTVAAPSVFIFPPDVVMTQSPLSLPVTPGEPASISCRSSQSLLHSNGFNYVDWYLQKPGQSPHLLIYFGSYRASGVPDRFSGSGSGTDFTLKISRVEAEDVGVYYCMQALQTPPWTFGQGTKVEIRR

SEQ ID NO: 81 - protein, 253 aa, Artificial Sequence
  Description of Artificial Sequence: Synthetic polypeptide
EVQLVQSGGGLVKPGGSLRLSCAASGFTFSSYAMHWVRQAPGKGLEWVAVISYDGSNKYYADSVKGRFTISRDNSKNTLYLQMNSLRAEDTAVYYCARFSGWPNNYYYYGMDVWGQGTTVTVSSASTKGPSVFPLAPQVQLQESGPGLVKPSQTLSLTCTVSGYSISSDFAWNWIRQPPGKGLEWMGYISYSGNTRYQPSLKSRITISRDTSKNQFFLKLNSVTAADTATYYCVTAGRGFPYWGQGTLVTVSS

SEQ ID NO: 82 - protein, 234 aa, Artificial Sequence
  Description of Artificial Sequence: Synthetic polypeptide
DVVMTQSPLSLPVTPGEPASISCRSSQSLLHSNGFNYVDWYLQKPGQSPHLLIYFGSYRASGVPDRFSGSGSGTDFTLKISRVEAEDVGVYYCMQALQTPPWTFGQGTKVEIRRTVAAPSVFIFPPDIQMTQSPSSMSVSVGDRVTITCHSSQDINSNIGWLQQKPGKSFKGLIYHGTNLDDGVPSRFSGSGSGTDYTLTISSLQPEDFATYYCVQYAQFPWTFGGGTKLEIKR

SEQ ID NO: 83 - protein, 253 aa, Artificial Sequence; identical to SEQ ID NO: 79
  Description of Artificial Sequence: Synthetic polypeptide

SEQ ID NO: 84 - protein, 227 aa, Artificial Sequence; identical to SEQ ID NO: 76
  Description of Artificial Sequence: Synthetic polypeptide

SEQ ID NO: 85 - protein, 253 aa, Artificial Sequence; identical to SEQ ID NO: 81
  Description of Artificial Sequence: Synthetic polypeptide

SEQ ID NO: 86 - protein, 227 aa, Artificial Sequence; identical to SEQ ID NO: 78
  Description of Artificial Sequence: Synthetic polypeptide

SEQ ID NO: 87 - protein, 246 aa, Artificial Sequence; identical to SEQ ID NO: 75
  Description of Artificial Sequence: Synthetic polypeptide

SEQ ID NO: 88 - protein, 234 aa, Artificial Sequence; identical to SEQ ID NO: 80
  Description of Artificial Sequence: Synthetic polypeptide

SEQ ID NO: 89 - protein, 246 aa, Artificial Sequence; identical to SEQ ID NO: 77
  Description of Artificial Sequence: Synthetic polypeptide

SEQ ID NO: 90 - protein, 234 aa, Artificial Sequence; identical to SEQ ID NO: 82
  Description of Artificial Sequence: Synthetic polypeptide

SEQ ID NO: 91 - protein, 239 aa, Artificial Sequence
  Description of Artificial Sequence: Synthetic polypeptide
QVQLQESGPGLVKPSQTLSLTCTVSGYSISSDFAWNWIRQPPGKGLEWMGYISYSGNTRYQPSLKSRITISRDTSKNQFFLKLNSVTAADTATYYCVTAGRGFPYWGQGTLVTVSSASTKGPQVQLQQWGAGLLKPSETLSLTCAVYGGSFSGYYWSWIRQPPGKGLEWIGEINHSGSTNYNPSLKSRVTISVETSKNQFSLKLSSVTAADTAVYYCARDKWTWYFDLWGRGTLVTVSS

SEQ ID NO: 92 - protein, 227 aa, Artificial Sequence
  Description of Artificial Sequence: Synthetic polypeptide
DIQMTQSPSSMSVSVGDRVTITCHSSQDINSNIGWLQQKPGKSFKGLIYHGTNLDDGVPSRFSGSGSGTDYTLTISSLQPEDFATYYCVQYAQFPWTFGGGTKLEIKRTVAAPDIEMTQSPDSLAVSLGERATINCRSSQSVLYSSSNRNYLAWYQQNPGQPPKLLIYWASTRESGVPDRFSGSGSGTDFTLTISSLQAEDVAVYYCQQYYSTPRTFGQGTKVEIKR

SEQ ID NO: 93 - protein, 239 aa, Artificial Sequence
  Description of Artificial Sequence: Synthetic polypeptide
QVQLQQWGAGLLKPSETLSLTCAVYGGSFSGYYWSWIRQPPGKGLEWIGEINHSGSTNYNPSLKSRVTISVETSKNQFSLKLSSVTAADTAVYYCARDKWTWYFDLWGRGTLVTVSSASTKGPQVQLQESGPGLVKPSQTLSLTCTVSGYSISSDFAWNWIRQPPGKGLEWMGYISYSGNTRYQPSLKSRITISRDTSKNQFFLKLNSVTAADTATYYCVTAGRGFPYWGQGTLVTVSS

SEQ ID NO: 94 - protein, 227 aa, Artificial Sequence
  Description of Artificial Sequence: Synthetic polypeptide
DIEMTQSPDSLAVSLGERATINCRSSQSVLYSSSNRNYLAWYQQNPGQPPKLLIYWASTRESGVPDRFSGSGSGTDFTLTISSLQAEDVAVYYCQQYYSTPRTFGQGTKVEIKRTVAAPDIQMTQSPSSMSVSVGDRVTITCHSSQDINSNIGWLQQKPGKSFKGLIYHGTNLDDGVPSRFSGSGSGTDYTLTISSLQPEDFATYYCVQYAQFPWTFGGGTKLEIKR

SEQ ID NO: 95 - protein, 246 aa, Artificial Sequence
  Description of Artificial Sequence: Synthetic polypeptide
QVQLQESGPGLVKPSQTLSLTCTVSGYSISSDFAWNWIRQPPGKGLEWMGYISYSGNTRYQPSLKSRITISRDTSKNQFFLKLNSVTAADTATYYCVTAGRGFPYWGQGTLVTVSSASTKGPSVFPLAPQVQLQQWGAGLLKPSETLSLTCAVYGGSFSGYYWSWIRQPPGKGLEWIGEINHSGSTNYNPSLKSRVTISVETSKNQFSLKLSSVTAADTAVYYCARDKWTWYFDLWGRGTLVTVSS

SEQ ID NO: 96 - protein, 234 aa, Artificial Sequence
  Description of Artificial Sequence: Synthetic polypeptide
DIQMTQSPSSMSVSVGDRVTITCHSSQDINSNIGWLQQKPGKSFKGLIYHGTNLDDGVPSRFSGSGSGTDYTLTISSLQPEDFATYYCVQYAQFPWTFGGGTKLEIKRTVAAPSVFIFPPDIEMTQSPDSLAVSLGERATINCRSSQSVLYSSSNRNYLAWYQQNPGQPPKLLIYWASTRESGVPDRFSGSGSGTDFTLTISSLQAEDVAVYYCQQYYSTPRTFGQGTKVEIKR

SEQ ID NO: 97 - protein, 246 aa, Artificial Sequence
  Description of Artificial Sequence: Synthetic polypeptide
QVQLQQWGAGLLKPSETLSLTCAVYGGSFSGYYWSWIRQPPGKGLEWIGEINHSGSTNYNPSLKSRVTISVETSKNQFSLKLSSVTAADTAVYYCARDKWTWYFDLWGRGTLVTVSSASTKGPSVFPLAPQVQLQESGPGLVKPSQTLSLTCTVSGYSISSDFAWNWIRQPPGKGLEWMGYISYSGNTRYQPSLKSRITISRDTSKNQFFLKLNSVTAADTATYYCVTAGRGFPYWGQGTLVTVSS

SEQ ID NO: 98 - protein, 234 aa, Artificial Sequence
  Description of Artificial Sequence: Synthetic polypeptide
DIEMTQSPDSLAVSLGERATINCRSSQSVLYSSSNRNYLAWYQQNPGQPPKLLIYWASTRESGVPDRFSGSGSGTDFTLTISSLQAEDVAVYYCQQYYSTPRTFGQGTKVEIKRTVAAPSVFIFPPDIQMTQSPSSMSVSVGDRVTITCHSSQDINSNIGWLQQKPGKSFKGLIYHGTNLDDGVPSRFSGSGSGTDYTLTISSLQPEDFATYYCVQYAQFPWTFGGGTKLEIKR

SEQ ID NO: 99 - protein, 246 aa, Artificial Sequence; identical to SEQ ID NO: 95
  Description of Artificial Sequence: Synthetic polypeptide

SEQ ID NO: 100 - protein, 227 aa, Artificial Sequence; identical to SEQ ID NO: 92
  Description of Artificial Sequence: Synthetic polypeptide

SEQ ID NO: 101 - protein, 246 aa, Artificial Sequence; identical to SEQ ID NO: 97
  Description of Artificial Sequence: Synthetic polypeptide

SEQ ID NO: 102 - protein, 227 aa, Artificial Sequence; identical to SEQ ID NO: 94
  Description of Artificial Sequence: Synthetic polypeptide

SEQ ID NO: 103 - protein, 239 aa, Artificial Sequence; identical to SEQ ID NO: 91
  Description of Artificial Sequence: Synthetic polypeptide

SEQ ID NO: 104 - protein, 234 aa, Artificial Sequence; identical to SEQ ID NO: 96
  Description of Artificial Sequence: Synthetic polypeptide

SEQ ID NO: 105 - protein, 239 aa, Artificial Sequence; identical to SEQ ID NO: 93
  Description of Artificial Sequence: Synthetic polypeptide

SEQ ID NO: 106 - protein, 234 aa, Artificial Sequence; identical to SEQ ID NO: 98
  Description of Artificial Sequence: Synthetic polypeptide

SEQ ID NO: 107 - protein, 241 aa, Artificial Sequence
  Description of Artificial Sequence: Synthetic polypeptide
QVQLQESGPGLVKPSQTLSLTCTVSGYSISSDFAWNWIRQPPGKGLEWMGYISYSGNTRYQPSLKSRITISRDTSKNQFFLKLNSVTAADTATYYCVTAGRGFPYWGQGTLVTVSSASTKGPEVQLVESGGGLVQPGGSLRLSCAASGFTFSIYSMNWVRQAPGKGLEWVSYISSSSSTIYYADSVKGRFTISRDNAKNSLYLQMNSLRDEDTAVYYCARDRGDFDAFDIWGQGTMVTVSS

SEQ ID NO: 108 - protein, 221 aa, Artificial Sequence
  Description of Artificial Sequence: Synthetic polypeptide
DIQMTQSPSSMSVSVGDRVTITCHSSQDINSNIGWLQQKPGKSFKGLIYHGTNLDDGVPSRFSGSGSGTDYTLTISSLQPEDFATYYCVQYAQFPWTFGGGTKLEIKRTVAAPDIQMTQSPSSLSASVGDRVTITCQASQDITNYLNWYQQKPGKAPKLLIYDASNLETGVPSRFSGSGSGTDFTFTISSLQPEDIATYNCQQCENFPITFGQGTRLEIKR

SEQ ID NO: 109 - protein, 241 aa, Artificial Sequence
  Description of Artificial Sequence: Synthetic polypeptide
EVQLVESGGGLVQPGGSLRLSCAASGFTFSIYSMNWVRQAPGKGLEWVSYISSSSSTIYYADSVKGRFTISRDNAKNSLYLQMNSLRDEDTAVYYCARDRGDFDAFDIWGQGTMVTVSSASTKGPQVQLQESGPGLVKPSQTLSLTCTVSGYSISSDFAWNWIRQPPGKGLEWMGYISYSGNTRYQPSLKSRITISRDTSKNQFFLKLNSVTAADTATYYCVTAGRGFPYWGQGTLVTVSS

SEQ ID NO: 110 - protein, 221 aa, Artificial Sequence
  Description of Artificial Sequence: Synthetic polypeptide
DIQMTQSPSSLSASVGDRVTITCQASQDITNYLNWYQQKPGKAPKLLIYDASNLETGVPSRFSGSGSGTDFTFTISSLQPEDIATYNCQQCENFPITFGQGTRLEIKRTVAAPDIQMTQSPSSMSVSVGDRVTITCHSSQDINSNIGWLQQKPGKSFKGLIYHGTNLDDGVPSRFSGSGSGTDYTLTISSLQPEDFATYYCVQYAQFPWTFGGGTKLEIKR

SEQ ID NO: 111 - protein, 248 aa, Artificial Sequence
  Description of Artificial Sequence: Synthetic polypeptide
QVQLQESGPGLVKPSQTLSLTCTVSGYSISSDFAWNWIRQPPGKGLEWMGYISYSGNTRYQPSLKSRITISRDTSKNQFFLKLNSVTAADTATYYCVTAGRGFPYWGQGTLVTVSSASTKGPSVFPLAPEVQLVESGGGLVQPGGSLRLSCAASGFTFSIYSMNWVRQAPGKGLEWVSYISSSSSTIYYADSVKGRFTISRDNAKNSLYLQMNSLRDEDTAVYYCARDRGDFDAFDIWGQGTMVTVSS

SEQ ID NO: 112 - protein, 228 aa, Artificial Sequence
  Description of Artificial Sequence: Synthetic polypeptide
DIQMTQSPSSMSVSVGDRVTITCHSSQDINSNIGWLQQKPGKSFKGLIYHGTNLDDGVPSRFSGSGSGTDYTLTISSLQPEDFATYYCVQYAQFPWTFGGGTKLEIKRTVAAPSVFIFPPDIQMTQSPSSLSASVGDRVTITCQASQDITNYLNWYQQKPGKAPKLLIYDASNLETGVPSRFSGSGSGTDFTFTISSLQPEDIATYNCQQCENFPITFGQGTRLEIKR

SEQ ID NO: 113 - protein, 248 aa, Artificial Sequence
  Description of Artificial Sequence: Synthetic polypeptide
EVQLVESGGGLVQPGGSLRLSCAASGFTFSIYSMNWVRQAPGKGLEWVSYISSSSSTIYYADSVKGRFTISRDNAKNSLYLQMNSLRDEDTAVYYCARDRGDFDAFDIWGQGTMVTVSSASTKGPSVFPLAPQVQLQESGPGLVKPSQTLSLTCTVSGYSISSDFAWNWIRQPPGKGLEWMGYISYSGNTRYQPSLKSRITISRDTSKNQFFLKLNSVTAADTATYYCVTAGRGFPYWGQGTLVTVSS

SEQ ID NO: 114 - protein, 228 aa, Artificial Sequence
  Description of Artificial Sequence: Synthetic polypeptide
DIQMTQSPSSLSASVGDRVTITCQASQDITNYLNWYQQKPGKAPKLLIYDASNLETGVPSRFSGSGSGTDFTFTISSLQPEDIATYNCQQCENFPITFGQGTRLEIKRTVAAPSVFIFPPDIQMTQSPSSMSVSVGDRVTITCHSSQDINSNIGWLQQKPGKSFKGLIYHGTNLDDGVPSRFSGSGSGTDYTLTISSLQPEDFATYYCVQYAQFPWTFGGGTKLEIKR

SEQ ID NO: 115 - protein, 248 aa, Artificial Sequence; identical to SEQ ID NO: 111
  Description of Artificial Sequence: Synthetic polypeptide

SEQ ID NO: 116 - protein, 221 aa, Artificial Sequence; identical to SEQ ID NO: 108
  Description of Artificial Sequence: Synthetic polypeptide

SEQ ID NO: 117 - protein, 248 aa, Artificial Sequence; identical to SEQ ID NO: 113
  Description of Artificial Sequence: Synthetic polypeptide

SEQ ID NO: 118 - protein, 221 aa, Artificial Sequence; identical to SEQ ID NO: 110
  Description of Artificial Sequence: Synthetic polypeptide

SEQ ID NO: 119 - protein, 241 aa, Artificial Sequence; identical to SEQ ID NO: 107
  Description of Artificial Sequence: Synthetic polypeptide

SEQ ID NO: 120 - protein, 228 aa, Artificial Sequence; identical to SEQ ID NO: 112
  Description of Artificial Sequence: Synthetic polypeptide

SEQ ID NO: 121 - protein, 241 aa, Artificial Sequence; identical to SEQ ID NO: 109
  Description of Artificial Sequence: Synthetic polypeptide

SEQ ID NO: 122 - protein, 228 aa, Artificial Sequence; identical to SEQ ID NO: 114
  Description of Artificial Sequence: Synthetic polypeptide

SEQ ID NO: 123 - protein, 241 aa, Artificial Sequence
  Description of Artificial Sequence: Synthetic polypeptide
QVQLQESGPGLVKPSQTLSLTCTVSGYSISSDFAWNWIRQPPGKGLEWMGYISYSGNTRYQPSLKSRITISRDTSKNQFFLKLNSVTAADTATYYCVTAGRGFPYWGQGTLVTVSSASTKGPQVQLQQSGAELARPGASVKMSCKASGYTFTRYTMHWVKQRPGQGLEWIGYINPSRGYTNYNQKFKDKATLTTDKSSSTAYMQLSSLTSEDSAVYYCARYYDDHYCLDYWGQGTTLTVSS

SEQ ID NO: 124 - protein, 220 aa, Artificial Sequence
  Description of Artificial Sequence: Synthetic polypeptide
DIQMTQSPSSMSVSVGDRVTITCHSSQDINSNIGWLQQKPGKSFKGLIYHGTNLDDGVPSRFSGSGSGTDYTLTISSLQPEDFATYYCVQYAQFPWTFGGGTKLEIKRTVAAPQIVLTQSPAIMSASPGEKVTMTCRASSSVSYMNWYQQKSGTSPKRWIYDTSKVASGVPYRFSGSGSGTSYSLTISSMEAEDAATYYCQQWSSNPLTFGSGTKLEINR

SEQ ID NO: 125 - protein, 241 aa, Artificial Sequence
  Description of Artificial Sequence: Synthetic polypeptide
QVQLQQSGAELARPGASVKMSCKASGYTFTRYTMHWVKQRPGQGLEWIGYINPSRGYTNYNQKFKDKATLTTDKSSSTAYMQLSSLTSEDSAVYYCARYYDDHYCLDYWGQGTTLTVSSASTKGPQVQLQESGPGLVKPSQTLSLTCTVSGYSISSDFAWNWIRQPPGKGLEWMGYISYSGNTRYQPSLKSRITISRDTSKNQFFLKLNSVTAADTATYYCVTAGRGFPYWGQGTLVTVSS

SEQ ID NO: 126 - protein, 220 aa, Artificial Sequence
  Description of Artificial Sequence: Synthetic polypeptide
QIVLTQSPAIMSASPGEKVTMTCRASSSVSYMNWYQQKSGTSPKRWIYDTSKVASGVPYRFSGSGSGTSYSLTISSMEAEDAATYYCQQWSSNPLTFGSGTKLEINRTVAAPDIQMTQSPSSMSVSVGDRVTITCHSSQDINSNIGWLQQKPGKSFKGLIYHGTNLDDGVPSRFSGSGSGTDYTLTISSLQPEDFATYYCVQYAQFPWTFGGGTKLEIKR

SEQ ID NO: 127 - protein, 248 aa, Artificial Sequence
  Description of Artificial Sequence: Synthetic polypeptide
QVQLQESGPGLVKPSQTLSLTCTVSGYSISSDFAWNWIRQPPGKGLEWMGYISYSGNTRYQPSLKSRITISRDTSKNQFFLKLNSVTAADTATYYCVTAGRGFPYWGQGTLVTVSSASTKGPSVFPLAPQVQLQQSGAELARPGASVKMSCKASGYTFTRYTMHWVKQRPGQGLEWIGYINPSRGYTNYNQKFKDKATLTTDKSSSTAYMQLSSLTSEDSAVYYCARYYDDHYCLDYWGQGTTLTVSS

SEQ ID NO: 128 - protein, 227 aa, Artificial Sequence
  Description of Artificial Sequence: Synthetic polypeptide
DIQMTQSPSSMSVSVGDRVTITCHSSQDINSNIGWLQQKPGKSFKGLIYHGTNLDDGVPSRFSGSGSGTDYTLTISSLQPEDFATYYCVQYAQFPWTFGGGTKLEIKRTVAAPSVFIFPPQIVLTQSPAIMSASPGEKVTMTCRASSSVSYMNWYQQKSGTSPKRWIYDTSKVASGVPYRFSGSGSGTSYSLTISSMEAEDAATYYCQQWSSNPLTFGSGTKLEINR

SEQ ID NO: 129 - protein, 248 aa, Artificial Sequence
  Description of Artificial Sequence: Synthetic polypeptide
QVQLQQSGAELARPGASVKMSCKASGYTFTRYTMHWVKQRPGQGLEWIGYINPSRGYTNYNQKFKDKATLTTDKSSSTAYMQLSSLTSEDSAVYYCARYYDDHYCLDYWGQGTTLTVSSASTKGPSVFPLAPQVQLQESGPGLVKPSQTLSLTCTVSGYSISSDFAWNWIRQPPGKGLEWMGYISYSGNTRYQPSLKSRITISRDTSKNQFFLKLNSVTAADTATYYCVTAGRGFPYWGQGTLVTVSS

SEQ ID NO: 130 - protein, 227 aa, Artificial Sequence
  Description of Artificial Sequence: Synthetic polypeptide
QIVLTQSPAIMSASPGEKVTMTCRASSSVSYMNWYQQKSGTSPKRWIYDTSKVASGVPYRFSGSGSGTSYSLTISSMEAEDAATYYCQQWSSNPLTFGSGTKLEINRTVAAPSVFIFPPDIQMTQSPSSMSVSVGDRVTITCHSSQDINSNIGWLQQKPGKSFKGLIYHGTNLDDGVPSRFSGSGSGTDYTLTISSLQPEDFATYYCVQYAQFPWTFGGGTKLEIKR

SEQ ID NO: 131 - protein, 248 aa, Artificial Sequence; identical to SEQ ID NO: 127
  Description of Artificial Sequence: Synthetic polypeptide

SEQ ID NO: 132 - protein, 220 aa, Artificial Sequence; identical to SEQ ID NO: 124
  Description of Artificial Sequence: Synthetic polypeptide

SEQ ID NO: 133 - protein, 248 aa, Artificial Sequence; identical to SEQ ID NO: 129
  Description of Artificial Sequence: Synthetic polypeptide

SEQ ID NO: 134 - protein, 220 aa, Artificial Sequence; identical to SEQ ID NO: 126
  Description of Artificial Sequence: Synthetic polypeptide

SEQ ID NO: 135 - protein, 241 aa, Artificial Sequence; identical to SEQ ID NO: 123
  Description of Artificial Sequence: Synthetic polypeptide

SEQ ID NO: 136 - protein, 227 aa, Artificial Sequence; identical to SEQ ID NO: 128
  Description of Artificial Sequence: Synthetic polypeptide

SEQ ID NO: 137 - protein, 241 aa, Artificial Sequence; identical to SEQ ID NO: 125
  Description of Artificial Sequence: Synthetic polypeptide

SEQ ID NO: 138 - protein, 227 aa, Artificial Sequence; identical to SEQ ID NO: 130
  Description of Artificial Sequence: Synthetic polypeptide

SEQ ID NO: 139 - protein, 247 aa, Artificial Sequence
  Description of Artificial Sequence: Synthetic polypeptide
QVQLQESGPGLVKPSQTLSLTCTVSGYSISSDFAWNWIRQPPGKGLEWMGYISYSGNTRYQPSLKSRITISRDTSKNQFFLKLNSVTAADTATYYCVTAGRGFPYWGQGTLVTVSSASTKGPEVQLLESGGGLVQPGGSLRLSCTASGFTFSSYAMNWVRQAPGKGLEWVSAISGSGGTTFYADSVKGRFTISRDNSRTTLYLQMNSLRAEDTAVYYCAKDLGWSDSYYYYYGMDVWGQGTTVTVSS

SEQ ID NO: 140 - protein, 221 aa, Artificial Sequence
  Description of Artificial Sequence: Synthetic polypeptide
DIQMTQSPSSMSVSVGDRVTITCHSSQDINSNIGWLQQKPGKSFKGLIYHGTNLDDGVPSRFSGSGSGTDYTLTISSLQPEDFATYYCVQYAQFPWTFGGGTKLEIKRTVAAPDIQMTQFPSSLSASVGDRVTITCRASQGIRNDLGWYQQKPGKAPKRLIYAASRLHRGVPSRFSGSGSGTEFTLTISSLQPEDFATYYCLQHNSYPCSFGQGTKLEIKR

SEQ ID NO: 141 - protein, 247 aa, Artificial Sequence
  Description of Artificial Sequence: Synthetic polypeptide
EVQLLESGGGLVQPGGSLRLSCTASGFTFSSYAMNWVRQAPGKGLEWVSAISGSGGTTFYADSVKGRFTISRDNSRTTLYLQMNSLRAEDTAVYYCAKDLGWSDSYYYYYGMDVWGQGTTVTVSSASTKGPQVQLQESGPGLVKPSQTLSLTCTVSGYSISSDFAWNWIRQPPGKGLEWMGYISYSGNTRYQPSLKSRITISRDTSKNQFFLKLNSVTAADTATYYCVTAGRGFPYWGQGTLVTVSS

SEQ ID NO: 142 - protein, 221 aa, Artificial Sequence
  Description of Artificial Sequence: Synthetic polypeptide
DIQMTQFPSSLSASVGDRVTITCRASQGIRNDLGWYQQKPGKAPKRLIYAASRLHRGVPSRFSGSGSGTEFTLTISSLQPEDFATYYCLQHNSYPCSFGQGTKLEIKRTVAAPDIQMTQSPSSMSVSVGDRVTITCHSSQDINSNIGWLQQKPGKSFKGLIYHGTNLDDGVPSRFSGSGSGTDYTLTISSLQPEDFATYYCVQYAQFPWTFGGGTKLEIKR

SEQ ID NO: 143 - protein, 254 aa, Artificial Sequence
  Description of Artificial Sequence: Synthetic polypeptide
QVQLQESGPGLVKPSQTLSLTCTVSGYSISSDFAWNWIRQPPGKGLEWMGYISYSGNTRYQPSLKSRITISRDTSKNQFFLKLNSVTAADTATYYCVTAGRGFPYWGQGTLVTVSSASTKGPSVFPLAPEVQLLESGGGLVQPGGSLRLSCTASGFTFSSYAMNWVRQAPGKGLEWVSAISGSGGTTFYADSVKGRFTISRDNSRTTLYLQMNSLRAEDTAVYYCAKDLGWSDSYYYYYGMDVWGQGTTVTVSS

SEQ ID NO: 144 - protein, 228 aa, Artificial Sequence
  Description of Artificial Sequence: Synthetic polypeptide
DIQMTQSPSSMSVSVGDRVTITCHSSQDINSNIGWLQQKPGKSFKGLIYHGTNLDDGVPSRFSGSGSGTDYTLTISSLQPEDFATYYCVQYAQFPWTFGGGTKLEIKRTVAAPSVFIFPPDIQMTQFPSSLSASVGDRVTITCRASQGIRNDLGWYQQKPGKAPKRLIYAASRLHRGVPSRFSGSGSGTEFTLTISSLQPEDFATYYCLQHNSYPCSFGQGTKLEIKR

SEQ ID NO: 145 - protein, 254 aa, Artificial Sequence
  Description of Artificial Sequence: Synthetic polypeptide
EVQLLESGGGLVQPGGSLRLSCTASGFTFSSYAMNWVRQAPGKGLEWVSAISGSGGTTFYADSVKGRFTISRDNSRTTLYLQMNSLRAEDTAVYYCAKDLGWSDSYYYYYGMDVWGQGTTVTVSSASTKGPSVFPLAPQVQLQESGPGLVKPSQTLSLTCTVSGYSISSDFAWNWIRQPPGKGLEWMGYISYSGNTRYQPSLKSRITISRDTSKNQFFLKLNSVTAADTATYYCVTAGRGFPYWGQGTLVTVSS

SEQ ID NO: 146 - protein, 228 aa, Artificial Sequence
  Description of Artificial Sequence: Synthetic polypeptide
DIQMTQFPSSLSASVGDRVTITCRASQGIRNDLGWYQQKPGKAPKRLIYAASRLHRGVPSRFSGSGSGTEFTLTISSLQPEDFATYYCLQHNSYPCSFGQGTKLEIKRTVAAPSVFIFPPDIQMTQSPSSMSVSVGDRVTITCHSSQDINSNIGWLQQKPGKSFKGLIYHGTNLDDGVPSRFSGSGSGTDYTLTISSLQPEDFATYYCVQYAQFPWTFGGGTKLEIKR

SEQ ID NO: 147 - protein, 254 aa, Artificial Sequence; identical to SEQ ID NO: 143
  Description of Artificial Sequence: Synthetic polypeptide

SEQ ID NO: 148 - protein, 221 aa, Artificial Sequence; identical to SEQ ID NO: 140
  Description of Artificial Sequence: Synthetic polypeptide

SEQ ID NO: 149 - protein, 254 aa, Artificial Sequence; identical to SEQ ID NO: 145
  Description of Artificial Sequence: Synthetic polypeptide

SEQ ID NO: 150 - protein, 221 aa, Artificial Sequence; identical to SEQ ID NO: 142
  Description of Artificial Sequence: Synthetic polypeptide

SEQ ID NO: 151 - protein, 247 aa, Artificial Sequence; identical to SEQ ID NO: 139
  Description of Artificial Sequence: Synthetic polypeptide

SEQ ID NO: 152 - protein, 228 aa, Artificial Sequence; identical to SEQ ID NO: 144
  Description of Artificial Sequence: Synthetic polypeptide

SEQ ID NO: 153 - protein, 247 aa, Artificial Sequence; identical to SEQ ID NO: 141
  Description of Artificial Sequence: Synthetic polypeptide

SEQ ID NO: 154 - protein, 228 aa, Artificial Sequence; identical to SEQ ID NO: 146
  Description of Artificial Sequence: Synthetic polypeptide

SEQ ID NO: 155 - protein, 244 aa, Artificial Sequence
  Description of Artificial Sequence: Synthetic polypeptide
QVQLQESGPGLVKPSQTLSLTCTVSGYSISSDFAWNWIRQPPGKGLEWMGYISYSGNTRYQPSLKSRITISRDTSKNQFFLKLNSVTAADTATYYCVTAGRGFPYWGQGTLVTVSSASTKGPQVQLVESGGGLVKPGGSLRLSCAASGFTFSDYYMSWIRQAPGKGLEWVSYISSSGSTIYYADSVKGRFTISRDNAKNSLYLQMNSLRAEDTAVYYCARDEYNSGWYVLFDYWGQGTLVTVSS

SEQ ID NO: 156 - protein, 221 aa, Artificial Sequence
  Description of Artificial Sequence: Synthetic polypeptide
DIQMTQSPSSMSVSVGDRVTITCHSSQDINSNIGWLQQKPGKSFKGLIYHGTNLDDGVPSRFSGSGSGTDYTLTISSLQPEDFATYYCVQYAQFPWTFGGGTKLEIKRTVAAPDIQMTQSPSSVSASVGDRVTITCRASQGISSWLAWYQQKPGKAPNLLIYEASSLQSGVPSRFGGSGSGTDFTLTISSLQPEDFATYYCQQANGFPWTFGQGTKVEIKR

SEQ ID NO: 157 - protein, 244 aa, Artificial Sequence
  Description of Artificial Sequence: Synthetic polypeptide
QVQLVESGGGLVKPGGSLRLSCAASGFTFSDYYMSWIRQAPGKGLEWVSYISSSGSTIYYADSVKGRFTISRDNAKNSLYLQMNSLRAEDTAVYYCARDEYNSGWYVLFDYWGQGTLVTVSSASTKGPQVQLQESGPGLVKPSQTLSLTCTVSGYSISSDFAWNWIRQPPGKGLEWMGYISYSGNTRYQPSLKSRITISRDTSKNQFFLKLNSVTAADTATYYCVTAGRGFPYWGQGTLVTVSS

SEQ ID NO: 158 - protein, 221 aa, Artificial Sequence
  Description of Artificial Sequence: Synthetic polypeptide
DIQMTQSPSSVSASVGDRVTITCRASQGISSWLAWYQQKPGKAPNLLIYEASSLQSGVPSRFGGSGSGTDFTLTISSLQPEDFATYYCQQANGFPWTFGQGTKVEIKRTVAAPDIQMTQSPSSMSVSVGDRVTITCHSSQDINSNIGWLQQKPGKSFKGLIYHGTNLDDGVPSRFSGSGSGTDYTLTISSLQPEDFATYYCVQYAQFPWTFGGGTKLEIKR

SEQ ID NO: 159 - protein, 251 aa, Artificial Sequence
  Description of Artificial Sequence: Synthetic polypeptide
QVQLQESGPGLVKPSQTLSLTCTVSGYSISSDFAWNWIRQPPGKGLEWMGYISYSGNTRYQPSLKSRITISRDTSKNQFFLKLNSVTAADTATYYCVTAGRGFPYWGQGTLVTVSSASTKGPSVFPLAPQVQLVESGGGLVKPGGSLRLSCAASGFTFSDYYMSWIRQAPGKGLEWVSYISSSGSTIYYADSVKGRFTISRDNAKNSLYLQMNSLRAEDTAVYYCARDEYNSGWYVLFDYWGQGTLVTVSS

SEQ ID NO: 160 - protein, 228 aa, Artificial Sequence
  Description of Artificial Sequence: Synthetic polypeptide
DIQMTQSPSSMSVSVGDRVTITCHSSQDINSNIGWLQQKPGKSFKGLIYHGTNLDDGVPSRFSGSGSGTDYTLTISSLQPEDFATYYCVQYAQFPWTFGGGTKLEIKRTVAAPSVFIFPPDIQMTQSPSSVSASVGDRVTITCRASQGISSWLAWYQQKPGKAPNLLIYEASSLQSGVPSRFGGSGSGTDFTLTISSLQPEDFATYYCQQANGFPWTFGQGTKVEIKR

SEQ ID NO: 161 - protein, 251 aa, Artificial Sequence
  Description of Artificial Sequence: Synthetic polypeptide
QVQLVESGGGLVKPGGSLRLSCAASGFTFSDYYMSWIRQAPGKGLEWVSYISSSGSTIYYADSVKGRFTISRDNAKNSLYLQMNSLRAEDTAVYYCARDEYNSGWYVLFDYWGQGTLVTVSSASTKGPSVFPLAPQVQLQESGPGLVKPSQTLSLTCTVSGYSISSDFAWNWIRQPPGKGLEWMGYISYSGNTRYQPSLKSRITISRDTSKNQFFLKLNSVTAADTATYYCVTAGRGFPYWGQGTLVTVSS

SEQ ID NO: 162 - protein, 228 aa, Artificial Sequence
  Description of Artificial Sequence: Synthetic polypeptide
DIQMTQSPSSVSASVGDRVTITCRASQGISSWLAWYQQKPGKAPNLLIYEASSLQSGVPSRFGGSGSGTDFTLTISSLQPEDFATYYCQQANGFPWTFGQGTKVEIKRTVAAPSVFIFPPDIQMTQSPSSMSVSVGDRVTITCHSSQDINSNIGWLQQKPGKSFKGLIYHGTNLDDGVPSRFSGSGSGTDYTLTISSLQPEDFATYYCVQYAQFPWTFGGGTKLEIKR

SEQ ID NO: 163 - protein, 251 aa, Artificial Sequence; identical to SEQ ID NO: 159
  Description of Artificial Sequence: Synthetic polypeptide

SEQ ID NO: 164 - protein, 221 aa, Artificial Sequence; identical to SEQ ID NO: 156
  Description of Artificial Sequence: Synthetic polypeptide

SEQ ID NO: 165 - protein, 251 aa, Artificial Sequence; identical to SEQ ID NO: 161
  Description of Artificial Sequence: Synthetic polypeptide

SEQ ID NO: 166 - protein, 221 aa, Artificial Sequence; identical to SEQ ID NO: 158
  Description of Artificial Sequence: Synthetic polypeptide

SEQ ID NO: 167 - protein, 244 aa, Artificial Sequence; identical to SEQ ID NO: 155
  Description of Artificial Sequence: Synthetic polypeptide

SEQ ID NO: 168 - protein, 228 aa, Artificial Sequence; identical to SEQ ID NO: 160
  Description of Artificial Sequence: Synthetic polypeptide

SEQ ID NO: 169 - protein, 244 aa, Artificial Sequence; identical to SEQ ID NO: 157
  Description of Artificial Sequence: Synthetic polypeptide

SEQ ID NO: 170 - protein, 228 aa, Artificial Sequence; identical to SEQ ID NO: 162
  Description of Artificial Sequence: Synthetic polypeptide

SEQ ID NO: 171 - protein, 245 aa, Artificial Sequence
  Description of Artificial Sequence: Synthetic polypeptide
QVQLQESGPGLVKPSQTLSLTCTVSGYSISSDFAWNWIRQPPGKGLEWMGYISYSGNTRYQPSLKSRITISRDTSKNQFFLKLNSVTAADTATYYCVTAGRGFPYWGQGTLVTVSSASTKGPEVQLVESGGGLVQPGGSLRLSCAASGYTFTNYGMNWVRQAPGKGLEWVGWINTYTGEPTYAADFKRRFTFSLDTSKSTAYLQMNSLRAEDTAVYYCAKYPHYYGSSHWYFDVWGQGTLVTVSS

SEQ ID NO: 172 - protein, 221 aa, Artificial Sequence
  Description of Artificial Sequence: Synthetic polypeptide
DIQMTQSPSSMSVSVGDRVTITCHSSQDINSNIGWLQQKPGKSFKGLIYHGTNLDDGVPSRFSGSGSGTDYTLTISSLQPEDFATYYCVQYAQFPWTFGGGTKLEIKRTVAAPDIQMTQSPSSLSASVGDRVTITCSASQDISNYLNWYQQKPGKAPKVLIYFTSSLHSGVPSRFSGSGSGTDFTLTISSLQPEDFATYYCQQYSTVPWTFGQGTKVEIKR

SEQ ID NO: 173 - protein, 245 aa, Artificial Sequence
  Description of Artificial Sequence: Synthetic polypeptide
EVQLVESGGGLVQPGGSLRLSCAASGYTFTNYGMNWVRQAPGKGLEWVGWINTYTGEPTYAADFKRRFTFSLDTSKSTAYLQMNSLRAEDTAVYYCAKYPHYYGSSHWYFDVWGQGTLVTVSSASTKGPQVQLQESGPGLVKPSQTLSLTCTVSGYSISSDFAWNWIRQPPGKGLEWMGYISYSGNTRYQPSLKSRITISRDTSKNQFFLKLNSVTAADTATYYCVTAGRGFPYWGQGTLVTVSS

SEQ ID NO: 174 - protein, 221 aa, Artificial Sequence
  Description of Artificial Sequence: Synthetic polypeptide
DIQMTQSPSSLSASVGDRVTITCSASQDISNYLNWYQQKPGKAPKVLIYFTSSLHSGVPSRFSGSGSGTDFTLTISSLQPEDFATYYCQQYSTVPWTFGQGTKVEIKRTVAAPDIQMTQSPSSMSVSVGDRVTITCHSSQDINSNIGWLQQKPGKSFKGLIYHGTNLDDGVPSRFSGSGSGTDYTLTISSLQPEDFATYYCVQYAQFPWTFGGGTKLEIKR

SEQ ID NO: 175 - protein, 252 aa, Artificial Sequence
  Description of Artificial Sequence: Synthetic polypeptide
QVQLQESGPGLVKPSQTLSLTCTVSGYSISSDFAWNWIRQPPGKGLEWMGYISYSGNTRYQPSLKSRITISRDTSKNQFFLKLNSVTAADTATYYCVTAGRGFPYWGQGTLVTVSSASTKGPSVFPLAPEVQLVESGGGLVQPGGSLRLSCAASGYTFTNYGMNWVRQAPGKGLEWVGWINTYTGEPTYAADFKRRFTFSLDTSKSTAYLQMNSLRAEDTAVYYCAKYPHYYGSSHWYFDVWGQGTLVTVSS

SEQ ID NO: 176 - protein, 228 aa, Artificial Sequence
  Description of Artificial Sequence: Synthetic polypeptide
DIQMTQSPSSMSVSVGDRVTITCHSSQDINSNIGWLQQKPGKSFKGLIYHGTNLDDGVPSRFSGSGSGTDYTLTISSLQPEDFATYYCVQYAQFPWTFGGGTKLEIKRTVAAPSVFIFPPDIQMTQSPSSLSASVGDRVTITCSASQDISNYLNWYQQKPGKAPKVLIYFTSSLHSGVPSRFSGSGSGTDFTLTISSLQPEDFATYYCQQYSTVPWTFGQGTKVEIKR

SEQ ID NO: 177 - protein, 252 aa, Artificial Sequence
  Description of Artificial Sequence: Synthetic polypeptide
EVQLVESGGGLVQPGGSLRLSCAASGYTFTNYGMNWVRQAPGKGLEWVGWINTYTGEPTYAADFKRRFTFSLDTSKSTAYLQMNSLRAEDTAVYYCAKYPHYYGSSHWYFDVWGQGTLVTVSSASTKGPSVFPLAPQVQLQESGPGLVKPSQTLSLTCTVSGYSISSDFAWNWIRQPPGKGLEWMGYISYSGNTRYQPSLKSRITISRDTSKNQFFLKLNSVTAADTATYYCVTAGRGFPYWGQGTLVTVSS

SEQ ID NO: 178 - protein, 228 aa, Artificial Sequence
  Description of Artificial Sequence: Synthetic polypeptide
DIQMTQSPSSLSASVGDRVTITCSASQDISNYLNWYQQKPGKAPKVLIYFTSSLHSGVPSRFSGSGSGTDFTLTISSLQPEDFATYYCQQYSTVPWTFGQGTKVEIKRTVAAPSVFIFPPDIQMTQSPSSMSVSVGDRVTITCHSSQDINSNIGWLQQKPGKSFKGLIYHGTNLDDGVPSRFSGSGSGTDYTLTISSLQPEDFATYYCVQYAQFPWTFGGGTKLEIKR

SEQ ID NO: 179 - protein, 252 aa, Artificial Sequence; identical to SEQ ID NO: 175
  Description of Artificial Sequence: Synthetic polypeptide

SEQ ID NO: 180 - protein, 221 aa, Artificial Sequence; identical to SEQ ID NO: 172
  Description of Artificial Sequence: Synthetic polypeptide

SEQ ID NO: 181 - protein, 252 aa, Artificial Sequence; identical to SEQ ID NO: 177
  Description of Artificial Sequence: Synthetic polypeptide

SEQ ID NO: 182 - protein, 221 aa, Artificial Sequence; identical to SEQ ID NO: 174
  Description of Artificial Sequence: Synthetic polypeptide

SEQ ID NO: 183 - protein, 245 aa, Artificial Sequence; identical to SEQ ID NO: 171
  Description of Artificial Sequence: Synthetic polypeptide

SEQ ID NO: 184 - protein, 228 aa, Artificial Sequence; identical to SEQ ID NO: 176
  Description of Artificial Sequence: Synthetic polypeptide

SEQ ID NO: 185 - protein, 245 aa, Artificial Sequence; identical to SEQ ID NO: 173
  Description of Artificial Sequence: Synthetic polypeptide

SEQ ID NO: 186 - protein, 228 aa, Artificial Sequence; identical to SEQ ID NO: 178
  Description of Artificial Sequence: Synthetic polypeptide

SEQ ID NO: 187 - protein, 240 aa, Artificial Sequence
  Description of Artificial Sequence: Synthetic polypeptide
QVQLQESGPGLVKPSQTLSLTCTVSGYSISSDFAWNWIRQPPGKGLEWMGYISYSGNTRYQPSLKSRITISRDTSKNQFFLKLNSVTAADTATYYCVTAGRGFPYWGQGTLVTVSSASTKGPEVQLVESGGGLVQPGGSLRLSCAASGFTFTDNWISWVRQAPGKGLEWVGYISPNSGFTYYADSVKGRFTISADTSKNTAYLQMNSLRAEDTAVYYCARDNFGGYFDYWGQGTLVTVSS

SEQ ID NO: 188 - protein, 222 aa, Artificial Sequence
  Description of Artificial Sequence: Synthetic polypeptide
DIQMTQSPSSMSVSVGDRVTITCHSSQDINSNIGWLQQKPGKSFKGLIYHGTNLDDGVPSRFSGSGSGTDYTLTISSLQPEDFATYYCVQYAQFPWTFGGGTKLEIKRTVAAPDIQMTQSPSSLSASVGDRVTITCRASQDVSTAVAWYQQKPGKAPKLLIYSASFLYSGVPSRFSGSGSGTDFTLTISSLQPEDFATTYYCQQSYTGTVTFGQGTKVEIKR

SEQ ID NO: 189 - protein, 240 aa, Artificial Sequence
  Description of Artificial Sequence: Synthetic polypeptide
EVQLVESGGGLVQPGGSLRLSCAASGFTFTDNWISWVRQAPGKGLEWVGYISPNSGFTYYADSVKGRFTISADTSKNTAYLQMNSLRAEDTAVYYCARDNFGGYFDYWGQGTLVTVSSASTKGPQVQLQESGPGLVKPSQTLSLTCTVSGYSISSDFAWNWIRQPPGKGLEWMGYISYSGNTRYQPSLKSRITISRDTSKNQFFLKLNSVTAADTATYYCVTAGRGFPYWGQGTLVTVSS

SEQ ID NO: 190 - protein, 222 aa, Artificial Sequence
  Description of Artificial Sequence: Synthetic polypeptide
DIQMTQSPSSLSASVGDRVTITCRASQDVSTAVAWYQQKPGKAPKLLIYSASFLYSGVPSRFSGSGSGTDFTLTISSLQPEDFATTYYCQQSYTGTVTFGQGTKVEIKRTVAAPDIQMTQSPSSMSVSVGDRVTITCHSSQDINSNIGWLQQKPGKSFKGLIYHGTNLDDGVPSRFSGSGSGTDYTLTISSLQPEDFATYYCVQYAQFPWTFGGGTKLEIKR

SEQ ID NO: 191 - protein, 247 aa, Artificial Sequence
  Description of Artificial Sequence: Synthetic polypeptide
QVQLQESGPGLVKPSQTLSLTCTVSGYSISSDFAWNWIRQPPGKGLEWMGYISYSGNTRYQPSLKSRITISRDTSKNQFFLKLNSVTAADTATYYCVTAGRGFPYWGQGTLVTVSSASTKGPSVFPLAPEVQLVESGGGLVQPGGSLRLSCAASGFTFTDNWISWVRQAPGKGLEWVGYISPNSGFTYYADSVKGRFTISADTSKNTAYLQMNSLRAEDTAVYYCARDNFGGYFDYWGQGTLVTVSS

SEQ ID NO: 192 - protein, 229 aa, Artificial Sequence
  Description of Artificial Sequence: Synthetic polypeptide
DIQMTQSPSSMSVSVGDRVTITCHSSQDINSNIGWLQQKPGKSFKGLIYHGTNLDDGVPSRFSGSGSGTDYTLTISSLQPEDFATYYCVQYAQFPWTFGGGTKLEIKRTVAAPSVFIFPPDIQMTQSPSSLSASVGDRVTITCRASQDVSTAVAWYQQKPGKAPKLLIYSASFLYSGVPSRFSGSGSGTDFTLTISSLQPEDFATTYYCQQSYTGTVTFGQGTKVEIKR

SEQ ID NO: 193 - protein, 247 aa, Artificial Sequence
  Description of Artificial Sequence: Synthetic polypeptide
EVQLVESGGGLVQPGGSLRLSCAASGFTFTDNWISWVRQAPGKGLEWVGYISPNSGFTYYADSVKGRFTISADTSKNTAYLQMNSLRAEDTAVYYCARDNFGGYFDYWGQGTLVTVSSASTKGPSVFPLAPQVQLQESGPGLVKPSQTLSLTCTVSGYSISSDFAWNWIRQPPGKGLEWMGYISYSGNTRYQPSLKSRITISRDTSKNQFFLKLNSVTAADTATYYCVTAGRGFPYWGQGTLVTVSS

SEQ ID NO: 194 - protein, 229 aa, Artificial Sequence
  Description of Artificial Sequence: Synthetic polypeptide
DIQMTQSPSSLSASVGDRVTITCRASQDVSTAVAWYQQKPGKAPKLLIYSASFLYSGVPSRFSGSGSGTDFTLTISSLQPEDFATTYYCQQSYTGTVTFGQGTKVEIKRTVAAPSVFIFPPDIQMTQSPSSMSVSVGDRVTITCHSSQDINSNIGWLQQKPGKSFKGLIYHGTNLDDGVPSRFSGSGSGTDYTLTISSLQPEDFATYYCVQYAQFPWTFGGGTKLEIKR

SEQ ID NO: 195 - protein, 247 aa, Artificial Sequence; identical to SEQ ID NO: 191
  Description of Artificial Sequence: Synthetic polypeptide

SEQ ID NO: 196 - protein, 222 aa, Artificial Sequence; identical to SEQ ID NO: 188
  Description of Artificial Sequence: Synthetic polypeptide

SEQ ID NO: 197 - protein, 247 aa, Artificial Sequence; identical to SEQ ID NO: 193
  Description of Artificial Sequence: Synthetic polypeptide

SEQ ID NO: 198 - protein, 222 aa, Artificial Sequence; identical to SEQ ID NO: 190
  Description of Artificial Sequence: Synthetic polypeptide

SEQ ID NO: 199 - protein, 240 aa, Artificial Sequence; identical to SEQ ID NO: 187
  Description of Artificial Sequence: Synthetic polypeptide

SEQ ID NO: 200 - protein, 229 aa, Artificial Sequence; identical to SEQ ID NO: 192
  Description of Artificial Sequence: Synthetic polypeptide

SEQ ID NO: 201 - protein, 240 aa, Artificial Sequence; identical to SEQ ID NO: 189
  Description of Artificial Sequence: Synthetic polypeptide

SEQ ID NO: 202 - protein, 229 aa, Artificial Sequence; identical to SEQ ID NO: 194
  Description of Artificial Sequence: Synthetic polypeptide

SEQ ID NO: 203 - protein, 238 aa, Artificial Sequence
  Description of Artificial Sequence: Synthetic polypeptide
QVQLQESGPGLVKPSQTLSLTCTVSGYSISSDFAWNWIRQPPGKGLEWMGYISYSGNTRYQPSLKSRITISRDTSKNQFFLKLNSVTAADTATYYCVTAGRGFPYWGQGTLVTVSSASTKGPQVQLQQSGAELVKPGASVKISCKASGYTFTDYYINWVKLAPGQGLEWIGWIYPGSGNTKYNEKFKGKATLTIDTSSSTAYMQLSSLTSEDTAVYFCVRDSPFFDYWGQGTLLTVSS

SEQ ID NO: 204 - protein, 226 aa, Artificial Sequence
  Description of Artificial Sequence: Synthetic polypeptide
DIQMTQSPSSMSVSVGDRVTITCHSSQDINSNIGWLQQKPGKSFKGLIYHGTNLDDGVPSRFSGSGSGTDYTLTISSLQPEDFATYYCVQYAQFPWTFGGGTKLEIKRTVAAPDIVLTQSPDSLAVSLGERVTMNCKSSQSLLNSGMRKSFLAWYQQKPGQSPKLLIYWASTRESGVPDRFTGSGSGTDFTLTISSVQAEDVAVYYCKQSYHLFTFGSGTKLEIKR

SEQ ID NO: 205 - protein, 238 aa, Artificial Sequence
  Description of Artificial Sequence: Synthetic polypeptide
QVQLQQSGAELVKPGASVKISCKASGYTFTDYYINWVKLAPGQGLEWIGWIYPGSGNTKYNEKFKGKATLTIDTSSSTAYMQLSSLTSEDTAVYFCVRDSPFFDYWGQGTLLTVSSASTKGPQVQLQESGPGLVKPSQTLSLTCTVSGYSISSDFAWNWIRQPPGKGLEWMGYISYSGNTRYQPSLKSRITISRDTSKNQFFLKLNSVTAADTATYYCVTAGRGFPYWGQGTLVTVSS

SEQ ID NO: 206 - protein, 226 aa, Artificial Sequence
  Description of Artificial Sequence: Synthetic polypeptide
DIVLTQSPDSLAVSLGERVTMNCKSSQSLLNSGMRKSFLAWYQQKPGQSPKLLIYWASTRESGVPDRFTGSGSGTDFTLTISSVQAEDVAVYYCKQSYHLFTFGSGTKLEIKRTVAAPDIQMTQSPSSMSVSVGDRVTITCHSSQDINSNIGWLQQKPGKSFKGLIYHGTNLDDGVPSRFSGSGSGTDYTLTISSLQPEDFATYYCVQYAQFPWTFGGGTKLEIKR

SEQ ID NO: 207 - protein, 245 aa, Artificial Sequence
  Description of Artificial Sequence: Synthetic polypeptide
QVQLQESGPGLVKPSQTLSLTCTVSGYSISSDFAWNWIRQPPGKGLEWMGYISYSGNTRYQPSLKSRITISRDTSKNQFFLKLNSVTAADTATYYCVTAGRGFPYWGQGTLVTVSSASTKGPSVFPLAPQVQLQQSGAELVKPGASVKISCKASGYTFTDYYINWVKLAPGQGLEWIGWIYPGSGNTKYNEKFKGKATLTIDTSSSTAYMQLSSLTSEDTAVYFCVRDSPFFDYWGQGTLLTVSS

SEQ ID NO: 208 - protein, 233 aa, Artificial Sequence
  Description of Artificial Sequence: Synthetic polypeptide
DIQMTQSPSSMSVSVGDRVTITCHSSQDINSNIGWLQQKPGKSFKGLIYHGTNLDDGVPSRFSGSGSGTDYTLTISSLQPEDFATYYCVQYAQFPWTFGGGTKLEIKRTVAAPSVFIFPPDIVLTQSPDSLAVSLGERVTMNCKSSQSLLNSGMRKSFLAWYQQKPGQSPKLLIYWASTRESGVPDRFTGSGSGTDFTLTISSVQAEDVAVYYCKQSYHLFTFGSGTKLEIKR

SEQ ID NO: 209 - protein, 245 aa, Artificial Sequence
  Description of Artificial Sequence: Synthetic polypeptide
QVQLQQSGAELVKPGASVKISCKASGYTFTDYYINWVKLAPGQGLEWIGWIYPGSGNTKYNEKFKGKATLTIDTSSSTAYMQLSSLTSEDTAVYFCVRDSPFFDYWGQGTLLTVSSASTKGPSVFPLAPQVQLQESGPGLVKPSQTLSLTCTVSGYSISSDFAWNWIRQPPGKGLEWMGYISYSGNTRYQPSLKSRITISRDTSKNQFFLKLNSVTAADTATYYCVTAGRGFPYWGQGTLVTVSS

SEQ ID NO: 210 - protein, 233 aa, Artificial Sequence
  Description of Artificial Sequence: Synthetic polypeptide
DIVLTQSPDSLAVSLGERVTMNCKSSQSLLNSGMRKSFLAWYQQKPGQSPKLLIYWASTRESGVPDRFTGSGSGTDFTLTISSVQAEDVAVYYCKQSYHLFTFGSGTKLEIKRTVAAPSVFIFPPDIQMTQSPSSMSVSVGDRVTITCHSSQDINSNIGWLQQKPGKSFKGLIYHGTNLDDGVPSRFSGSGSGTDYTLTISSLQPEDFATYYCVQYAQFPWTFGGGTKLEIKR

SEQ ID NO: 211 - protein, 245 aa, Artificial Sequence; identical to SEQ ID NO: 207
  Description of Artificial Sequence: Synthetic polypeptide

SEQ ID NO: 212 - protein, 226 aa, Artificial Sequence; identical to SEQ ID NO: 204
  Description of Artificial Sequence: Synthetic polypeptide

SEQ ID NO: 213 - protein, 245 aa, Artificial Sequence; identical to SEQ ID NO: 209
  Description of Artificial Sequence: Synthetic polypeptide

SEQ ID NO: 214 - protein, 226 aa, Artificial Sequence; identical to SEQ ID NO: 206
  Description of Artificial Sequence: Synthetic polypeptide

SEQ ID NO: 215 - protein, 238 aa, Artificial Sequence; identical to SEQ ID NO: 203
  Description of Artificial Sequence: Synthetic polypeptide

SEQ ID NO: 216 - protein, 233 aa, Artificial Sequence; identical to SEQ ID NO: 208
  Description of Artificial Sequence: Synthetic polypeptide

SEQ ID NO: 217 - protein, 238 aa, Artificial Sequence; identical to SEQ ID NO: 205
  Description of Artificial Sequence: Synthetic polypeptide

SEQ ID NO: 218 - protein, 233 aa, Artificial Sequence; identical to SEQ ID NO: 210
  Description of Artificial Sequence: Synthetic polypeptide

SEQ ID NO: 219 - protein, 241 aa, Artificial Sequence
  Description of Artificial Sequence: Synthetic polypeptide
QVQLQESGPGLVKPSQTLSLTCTVSGYSISSDFAWNWIRQPPGKGLEWMGYISYSGNTRYQPSLKSRITISRDTSKNQFFLKLNSVTAADTATYYCVTAGRGFPYWGQGTLVTVSSASTKGPEVQLLESGGGLVQPGGSLRLSCAASGFTFSHYVMAWVRQAPGKGLEWVSSISSSGGWTLYADSVKGRFTISRDNSKNTLYLQMNSLRAEDTAVYYCTRGLKMATIFDYWGQGTLVTVSS

SEQ ID NO: 220 - protein, 225 aa, Artificial Sequence
  Description of Artificial Sequence: Synthetic polypeptide
DIQMTQSPSSMSVSVGDRVTITCHSSQDINSNIGWLQQKPGKSFKGLIYHGTNLDDGVPSRFSGSGSGTDYTLTISSLQPEDFATYYCVQYAQFPWTFGGGTKLEIKRTVAAPQSALTQPASVSGSPGQSITISCTGTSSDVGSYNVVSWYQQHPGKAPKLIIYEVSQRPSGVSNRFSGSKSGNTASLTISGLQTEDEADYYCCSYAGSSIFVIFGGGTKVTVLG

SEQ ID NO: 221 - protein, 241 aa, Artificial Sequence
  Description of Artificial Sequence: Synthetic polypeptide
EVQLLESGGGLVQPGGSLRLSCAASGFTFSHYVMAWVRQAPGKGLEWVSSISSSGGWTLYADSVKGRFTISRDNSKNTLYLQMNSLRAEDTAVYYCTRGLKMATIFDYWGQGTLVTVSSASTKGPQVQLQESGPGLVKPSQTLSLTCTVSGYSISSDFAWNWIRQPPGKGLEWMGYISYSGNTRYQPSLKSRITISRDTSKNQFFLKLNSVTAADTATYYCVTAGRGFPYWGQGTLVTVSS

SEQ ID NO: 222 - protein, 226 aa, Artificial Sequence
  Description of Artificial Sequence: Synthetic polypeptide
QSALTQPASVSGSPGQSITISCTGTSSDVGSYNVVSWYQQHPGKAPKLIIYEVSQRPSGVSNRFSGSKSGNTASLTISGLQTEDEADYYCCSYAGSSIFVIFGGGTKVTVLGQPKAAPDIQMTQSPSSMSVSVGDRVTITCHSSQDINSNIGWLQQKPGKSFKGLIYHGTNLDDGVPSRFSGSGSGTDYTLTISSLQPEDFATYYCVQYAQFPWTFGGGTKLEIKR

SEQ ID NO: 223 - protein, 248 aa, Artificial Sequence
  Description of Artificial Sequence: Synthetic polypeptide
QVQLQESGPGLVKPSQTLSLTCTVSGYSISSDFAWNWIRQPPGKGLEWMGYISYSGNTRYQPSLKSRITISRDTSKNQFFLKLNSVTAADTATYYCVTAGRGFPYWGQGTLVTVSSASTKGPSVFPLAPEVQLLESGGGLVQPGGSLRLSCAASGFTFSHYVMAWVRQAPGKGLEWVSSISSSGGWTLYADSVKGRFTISRDNSKNTLYLQMNSLRAEDTAVYYCTRGLKMATIFDYWGQGTLVTVSS

SEQ ID NO: 224 - protein, 232 aa, Artificial Sequence
  Description of Artificial Sequence: Synthetic polypeptide
DIQMTQSPSSMSVSVGDRVTITCHSSQDINSNIGWLQQKPGKSFKGLIYHGTNLDDGVPSRFSGSGSGTDYTLTISSLQPEDFATYYCVQYAQFPWTFGGGTKLEIKRTVAAPSVFIFPPQSALTQPASVSGSPGQSITISCTGTSSDVGSYNVVSWYQQHPGKAPKLIIYEVSQRPSGVSNRFSGSKSGNTASLTISGLQTEDEADYYCCSYAGSSIFVIFGGGTKVTVLG

SEQ ID NO: 225 - protein, 248 aa, Artificial Sequence
  Description of Artificial Sequence: Synthetic polypeptide
EVQLLESGGGLVQPGGSLRLSCAASGFTFSHYVMAWVRQAPGKGLEWVSSISSSGGWTLYADSVKGRFTISRDNSKNTLYLQMNSLRAEDTAVYYCTRGLKMATIFDYWGQGTLVTVSSASTKGPSVFPLAPQVQLQESGPGLVKPSQTLSLTCTVSGYSISSDFAWNWIRQPPGKGLEWMGYISYSGNTRYQPSLKSRITISRDTSKNQFFLKLNSVTAADTATYYCVTAGRGFPYWGQGTLVTVSS

SEQ ID NO: 226 - protein, 233 aa, Artificial Sequence
  Description of Artificial Sequence: Synthetic polypeptide
QSALTQPASVSGSPGQSITISCTGTSSDVGSYNVVSWYQQHPGKAPKLIIYEVSQRPSGVSNRFSGSKSGNTASLTISGLQTEDEADYYCCSYAGSSIFVIFGGGTKVTVLGQPKAAPSVTLFPPDIQMTQSPSSMSVSVGDRVTITCHSSQDINSNIGWLQQKPGKSFKGLIYHGTNLDDGVPSRFSGSGSGTDYTLTISSLQPEDFATYYCVQYAQFPWTFGGGTKLEIKR

SEQ ID NO: 227 - protein, 248 aa, Artificial Sequence; identical to SEQ ID NO: 223
  Description of Artificial Sequence: Synthetic polypeptide

SEQ ID NO: 228 - protein, 225 aa, Artificial Sequence; identical to SEQ ID NO: 220
  Description of Artificial Sequence: Synthetic polypeptide

SEQ ID NO: 229 - protein, 248 aa, Artificial Sequence; identical to SEQ ID NO: 225
  Description of Artificial Sequence: Synthetic polypeptide

SEQ ID NO: 230 - protein, 226 aa, Artificial Sequence; identical to SEQ ID NO: 222
  Description of Artificial Sequence: Synthetic polypeptide

SEQ ID NO: 231 - protein, 241 aa, Artificial Sequence; identical to SEQ ID NO: 219
  Description of Artificial Sequence: Synthetic polypeptide

SEQ ID NO: 232 - protein, 232 aa, Artificial Sequence; identical to SEQ ID NO: 224
  Description of Artificial Sequence: Synthetic polypeptide

SEQ ID NO: 233 - protein, 241 aa, Artificial Sequence; identical to SEQ ID NO: 221
  Description of Artificial Sequence: Synthetic polypeptide

SEQ ID NO: 234 - protein, 233 aa, Artificial Sequence; identical to SEQ ID NO: 226
  Description of Artificial Sequence: Synthetic polypeptide

SEQ ID NO: 235 - protein, 242 aa, Artificial Sequence
  Description of Artificial Sequence: Synthetic polypeptide
QVQLQESGPGLVKPSQTLSLTCTVSGYSISSDFAWNWIRQPPGKGLEWMGYISYSGNTRYQPSLKSRITISRDTSKNQFFLKLNSVTAADTATYYCVTAGRGFPYWGQGTLVTVSSASTKGPEVQLVESGGGLVQPGGSLRLSCAASGFTISDYWIHWVRQAPGKGLEWVAGITPAGGYTYYADSVKGRFTISADTSKNTAYLQMNSLRAEDTAVYYCARFVFFLPYAMDYWGQGTLVTVSS

SEQ ID NO: 236 - protein, 221 aa, Artificial Sequence
  Description of Artificial Sequence: Synthetic polypeptide
DIQMTQSPSSMSVSVGDRVTITCHSSQDINSNIGWLQQKPGKSFKGLIYHGTNLDDGVPSRFSGSGSGTDYTLTISSLQPEDFATYYCVQYAQFPWTFGGGTKLEIKRTVAAPDIQMTQSPSSLSASVGDRVTITCRASQDVSTAVAWYQQKPGKAPKLLIYSASFLYSGVPSRFSGSGSGTDFTLTISSLQPEDFATYYCQQSYTTPPTFGQGTKVEIKR

SEQ ID NO: 237 - protein, 242 aa, Artificial Sequence
  Description of Artificial Sequence: Synthetic polypeptide
EVQLVESGGGLVQPGGSLRLSCAASGFTISDYWIHWVRQAPGKGLEWVAGITPAGGYTYYADSVKGRFTISADTSKNTAYLQMNSLRAEDTAVYYCARFVFFLPYAMDYWGQGTLVTVSSASTKGPQVQLQESGPGLVKPSQTLSLTCTVSGYSISSDFAWNWIRQPPGKGLEWMGYISYSGNTRYQPSLKSRITISRDTSKNQFFLKLNSVTAADTATYYCVTAGRGFPYWGQGTLVTVSS

SEQ ID NO: 238 - protein, 221 aa, Artificial Sequence
  Description of Artificial Sequence: Synthetic polypeptide
DIQMTQSPSSLSASVGDRVTITCRASQDVSTAVAWYQQKPGKAPKLLIYSASFLYSGVPSRFSGSGSGTDFTLTISSLQPEDFATYYCQQSYTTPPTFGQGTKVEIKRTVAAPDIQMTQSPSSMSVSVGDRVTITCHSSQDINSNIGWLQQKPGKSFKGLIYHGTNLDDGVPSRFSGSGSGTDYTLTISSLQPEDFATYYCVQYAQFPWTFGGGTKLEIKR

SEQ ID NO: 239 - protein, 249 aa, Artificial Sequence
  Description of Artificial Sequence: Synthetic polypeptide
QVQLQESGPGLVKPSQTLSLTCTVSGYSISSDFAWNWIRQPPGKGLEWMGYISYSGNTRYQPSLKSRITISRDTSKNQFFLKLNSVTAADTATYYCVTAGRGFPYWGQGTLVTVSSASTKGPSVFPLAPEVQLVESGGGLVQPGGSLRLSCAASGFTISDYWIHWVRQAPGKGLEWVAGITPAGGYTYYADSVKGRFTISADTSKNTAYLQMNSLRAEDTAVYYCARFVFFLPYAMDYWGQGTLVTVSS

SEQ ID NO: 240 - protein, 228 aa, Artificial Sequence
  Description of Artificial Sequence: Synthetic polypeptide
DIQMTQSPSSMSVSVGDRVTITCHSSQDINSNIGWLQQKPGKSFKGLIYHGTNLDDGVPSRFSGSGSGTDYTLTISSLQPEDFATYYCVQYAQFPWTFGGGTKLEIKRTVAAPSVFIFPPDIQMTQSPSSLSASVGDRVTITCRASQDVSTAVAWYQQKPGKAPKLLIYSASFLYSGVPSRFSGSGSGTDFTLTISSLQPEDFATYYCQQSYTTPPTFGQGTKVEIKR

SEQ ID NO: 241 - protein, 249 aa, Artificial Sequence
  Description of Artificial Sequence: Synthetic polypeptide
EVQLVESGGGLVQPGGSLRLSCAASGFTISDYWIHWVRQAPGKGLEWVAGITPAGGYTYYADSVKGRFTISADTSKNTAYLQMNSLRAEDTAVYYCARFVFFLPYAMDYWGQGTLVTVSSASTKGPSVFPLAPQVQLQESGPGLVKPSQTLSLTCTVSGYSISSDFAWNWIRQPPGKGLEWMGYISYSGNTRYQPSLKSRITISRDTSKNQFFLKLNSVTAADTATYYCVTAGRGFPYWGQGTLVTVSS

SEQ ID NO: 242 - protein, 228 aa, Artificial Sequence
  Description of Artificial Sequence: Synthetic polypeptide
DIQMTQSPSSLSASVGDRVTITCRASQDVSTAVAWYQQKPGKAPKLLIYSASFLYSGVPSRFSGSGSGTDFTLTISSLQPEDFATYYCQQSYTTPPTFGQGTKVEIKRTVAAPSVFIFPPDIQMTQSPSSMSVSVGDRVTITCHSSQDINSNIGWLQQKPGKSFKGLIYHGTNLDDGVPSRFSGSGSGTDYTLTISSLQPEDFATYYCVQYAQFPWTFGGGTKLEIKR

SEQ ID NO: 243 - protein, 249 aa, Artificial Sequence; identical to SEQ ID NO: 239
  Description of Artificial Sequence: Synthetic polypeptide

SEQ ID NO: 244 - protein, 221 aa, Artificial Sequence; identical to SEQ ID NO: 236
  Description of Artificial Sequence: Synthetic polypeptide

SEQ ID NO: 245 - protein, 249 aa, Artificial Sequence; identical to SEQ ID NO: 241
  Description of Artificial Sequence: Synthetic polypeptide

SEQ ID NO: 246 - protein, 221 aa, Artificial Sequence; identical to SEQ ID NO: 238
  Description of Artificial Sequence: Synthetic polypeptide

SEQ ID NO: 247 - protein, 242 aa, Artificial Sequence; identical to SEQ ID NO: 235
  Description of Artificial Sequence: Synthetic polypeptide

SEQ ID NO: 248 - protein, 228 aa, Artificial Sequence; identical to SEQ ID NO: 240
  Description of Artificial Sequence: Synthetic polypeptide

SEQ ID NO: 249 - protein, 242 aa, Artificial Sequence; identical to SEQ ID NO: 237
  Description of Artificial Sequence: Synthetic polypeptide

SEQ ID NO: 250 - protein, 228 aa, Artificial Sequence; identical to SEQ ID NO: 242
  Description of Artificial Sequence: Synthetic polypeptide

SEQ ID NO: 251 - protein, 243 aa, Artificial Sequence
  Description of Artificial Sequence: Synthetic polypeptide
QVQLQESGPGLVKPSQTLSLTCTVSGYSISSDFAWNWIRQPPGKGLEWMGYISYSGNTRYQPSLKSRITISRDTSKNQFFLKLNSVTAADTATYYCVTAGRGFPYWGQGTLVTVSSASTKGPEVQLVESGGGLVQPGGSLRLSCAASGFTINASWIHWVRQAPGKGLEWVGAIYPYSGYTNYADSVKGRFTISADTSKNTAYLQMNSLRAEDTAVYYCARWGHSTSPWAMDYWGQGTLVTVSS

SEQ ID NO: 252 - protein, 221 aa, Artificial Sequence
  Description of Artificial Sequence: Synthetic polypeptide
DIQMTQSPSSMSVSVGDRVTITCHSSQDINSNIGWLQQKPGKSFKGLIYHGTNLDDGVPSRFSGSGSGTDYTLTISSLQPEDFATYYCVQYAQFPWTFGGGTKLEIKRTVAAPDIQMTQSPSSLSASVGDRVTITCRASQVIRRSLAWYQQKPGKAPKLLIYAASNLASGVPSRFSGSGSGTDFTLTISSLQPEDFATYYCQQSNTSPLTFGQGTKVEIKR

SEQ ID NO: 253 - protein, 243 aa, Artificial Sequence
  Description of Artificial Sequence: Synthetic polypeptide
EVQLVESGGGLVQPGGSLRLSCAASGFTINASWIHWVRQAPGKGLEWVGAIYPYSGYTNYADSVKGRFTISADTSKNTAYLQMNSLRAEDTAVYYCARWGHSTSPWAMDYWGQGTLVTVSSASTKGPQVQLQESGPGLVKPSQTLSLTCTVSGYSISSDFAWNWIRQPPGKGLEWMGYISYSGNTRYQPSLKSRITISRDTSKNQFFLKLNSVTAADTATYYCVTAGRGFPYWGQGTLVTVSS

SEQ ID NO: 254 - protein, 221 aa, Artificial Sequence
  Description of Artificial Sequence: Synthetic polypeptide
DIQMTQSPSSLSASVGDRVTITCRASQVIRRSLAWYQQKPGKAPKLLIYAASNLASGVPSRFSGSGSGTDFTLTISSLQPEDFATYYCQQSNTSPLTFGQGTKVEIKRTVAAPDIQMTQSPSSMSVSVGDRVTITCHSSQDINSNIGWLQQKPGKSFKGLIYHGTNLDDGVPSRFSGSGSGTDYTLTISSLQPEDFATYYCVQYAQFPWTFGGGTKLEIKR

SEQ ID NO: 255 - protein, 250 aa, Artificial Sequence
  Description of Artificial Sequence: Synthetic polypeptide
QVQLQESGPGLVKPSQTLSLTCTVSGYSISSDFAWNWIRQPPGKGLEWMGYISYSGNTRYQPSLKSRITISRDTSKNQFFLKLNSVTAADTATYYCVTAGRGFPYWGQGTLVTVSSASTKGPSVFPLAPEVQLVESGGGLVQPGGSLRLSCAASGFTINASWIHWVRQAPGKGLEWVGAIYPYSGYTNYADSVKGRFTISADTSKNTAYLQMNSLRAEDTAVYYCARWGHSTSPWAMDYWGQGTLVTVSS

SEQ ID NO: 256 - protein, 228 aa, Artificial Sequence
  Description of Artificial Sequence: Synthetic polypeptide
DIQMTQSPSSMSVSVGDRVTITCHSSQDINSNIGWLQQKPGKSFKGLIYHGTNLDDGVPSRFSGSGSGTDYTLTISSLQPEDFATYYCVQYAQFPWTFGGGTKLEIKRTVAAPSVFIFPPDIQMTQSPSSLSASVGDRVTITCRASQVIRRSLAWYQQKPGKAPKLLIYAASNLASGVPSRFSGSGSGTDFTLTISSLQPEDFATYYCQQSNTSPLTFGQGTKVEIKR

SEQ ID NO: 257 - protein, 250 aa, Artificial Sequence
  Description of Artificial Sequence: Synthetic polypeptide
EVQLVESGGGLVQPGGSLRLSCAASGFTINASWIHWVRQAPGKGLEWVGAIYPYSGYTNYADSVKGRFTISADTSKNTAYLQMNSLRAEDTAVYYCARWGHSTSPWAMDYWGQGTLVTVSSASTKGPSVFPLAPQVQLQESGPGLVKPSQTLSLTCTVSGYSISSDFAWNWIRQPPGKGLEWMGYISYSGNTRYQPSLKSRITISRDTSKNQFFLKLNSVTAADTATYYCVTAGRGFPYWGQGTLVTVSS

SEQ ID NO: 258 - protein, 228 aa, Artificial Sequence
  Description of Artificial Sequence: Synthetic polypeptide
DIQMTQSPSSLSASVGDRVTITCRASQVIRRSLAWYQQKPGKAPKLLIYAASNLASGVPSRFSGSGSGTDFTLTISSLQPEDFATYYCQQSNTSPLTFGQGTKVEIKRTVAAPSVFIFPPDIQMTQSPSSMSVSVGDRVTITCHSSQDINSNIGWLQQKPGKSFKGLIYHGTNLDDGVPSRFSGSGSGTDYTLTISSLQPEDFATYYCVQYAQFPWTFGGGTKLEIKR

SEQ ID NO: 259 - protein, 250 aa, Artificial Sequence; identical to SEQ ID NO: 255
  Description of Artificial Sequence: Synthetic polypeptide

SEQ ID NO: 260 - protein, 221 aa, Artificial Sequence; identical to SEQ ID NO: 252
  Description of Artificial Sequence: Synthetic polypeptide

SEQ ID NO: 261 - protein, 250 aa, Artificial Sequence; identical to SEQ ID NO: 257
  Description of Artificial Sequence: Synthetic polypeptide

SEQ ID NO: 262 - protein, 221 aa, Artificial Sequence; identical to SEQ ID NO: 254
  Description of Artificial Sequence: Synthetic polypeptide

SEQ ID NO: 263 - protein, 243 aa, Artificial Sequence; identical to SEQ ID NO: 251
  Description of Artificial Sequence: Synthetic polypeptide

SEQ ID NO: 264 - protein, 228 aa, Artificial Sequence; identical to SEQ ID NO: 256
  Description of Artificial Sequence: Synthetic polypeptide

SEQ ID NO: 265 - protein, 243 aa, Artificial Sequence; identical to SEQ ID NO: 253
  Description of Artificial Sequence: Synthetic polypeptide

SEQ ID NO: 266 - protein, 228 aa, Artificial Sequence; identical to SEQ ID NO: 258
  Description of Artificial Sequence: Synthetic polypeptide

SEQ ID NO: 267 - protein, 240 aa, Artificial Sequence
  Description of Artificial Sequence: Synthetic polypeptide
QVQLKQSGPGLVQPSQSLSITCTVSGFSLTNYGVHWVRQSPGKGLEWLGVIWSGGNTDYNTPFTSRLSINKDNSKSQVFFKMNSLQSNDTAIYYCARALTYYDYEFAYWGQGTLVTVSAASTKGPEVQLVESGGGLVQPGSSLKLSCVASGFTFSNYGMNWIRQAPKKGLEWIGMIYYDSSEKHYADSVKGRFTISRDNSKNTLYLEMNSLRSEDTAIYYCAKGTTPDYWGQGVMVTVSS

SEQ ID NO: 268 - protein, 226 aa, Artificial Sequence
  Description of Artificial Sequence: Synthetic polypeptide
DILLTQSPVILSVSPGERVSFSCRASQSIGTNIHWYQQRTNGSPRLLIKYASESISGIPSRFSGSGSGTDFTLSINSVESEDIADYYCQQNNNWPTTFGAGTKLELKRTVAAPDVVLTQTPVSLSVTLGDQASMSCRSSQSLEYSDGYTFLEWFLQKPGQSPQLLIYEVSNRFSGVPDRFIGSGSGTDFTLKISRVEPEDLGVYYCFQATHDPLTFGSGTKLEIKR

SEQ ID NO: 269 - protein, 240 aa, Artificial Sequence
  Description of Artificial Sequence: Synthetic polypeptide
EVQLVESGGGLVQPGSSLKLSCVASGFTFSNYGMNWIRQAPKKGLEWIGMIYYDSSEKHYADSVKGRFTISRDNSKNTLYLEMNSLRSEDTAIYYCAKGTTPDYWGQGVMVTVSSASTKGPQVQLKQSGPGLVQPSQSLSITCTVSGFSLTNYGVHWVRQSPGKGLEWLGVIWSGGNTDYNTPFTSRLSINKDNSKSQVFFKMNSLQSNDTAIYYCARALTYYDYEFAYWGQGTLVTVSA

SEQ ID NO: 270 - protein, 226 aa, Artificial Sequence
  Description of Artificial Sequence: Synthetic polypeptide
DVVLTQTPVSLSVTLGDQASMSCRSSQSLEYSDGYTFLEWFLQKPGQSPQLLIYEVSNRFSGVPDRFIGSGSGTDFTLKISRVEPEDLGVYYCFQATHDPLTFGSGTKLEIKRTVAAPDILLTQSPVILSVSPGERVSFSCRASQSIGTNIHWYQQRTNGSPRLLIKYASESISGIPSRFSGSGSGTDFTLSINSVESEDIADYYCQQNNNWPTTFGAGTKLELKR

SEQ ID NO: 271 - protein, 247 aa, Artificial Sequence
  Description of Artificial Sequence: Synthetic polypeptide
QVQLKQSGPGLVQPSQSLSITCTVSGFSLTNYGVHWVRQSPGKGLEWLGVIWSGGNTDYNTPFTSRLSINKDNSKSQVFFKMNSLQSNDTAIYYCARALTYYDYEFAYWGQGTLVTVSAASTKGPSVFPLAPEVQLVESGGGLVQPGSSLKLSCVASGFTFSNYGMNWIRQAPKKGLEWIGMIYYDSSEKHYADSVKGRFTISRDNSKNTLYLEMNSLRSEDTAIYYCAKGTTPDYWGQGVMVTVSS

SEQ ID NO: 272 - protein, 233 aa, Artificial Sequence
  Description of Artificial Sequence: Synthetic polypeptide
DILLTQSPVILSVSPGERVSFSCRASQSIGTNIHWYQQRTNGSPRLLIKYASESISGIPSRFSGSGSGTDFTLSINSVESEDIADYYCQQNNNWPTTFGAGTKLELKRTVAAPSVFIFPPDVVLTQTPVSLSVTLGDQASMSCRSSQSLEYSDGYTFLEWFLQKPGQSPQLLIYEVSNRFSGVPDRFIGSGSGTDFTLKISRVEPEDLGVYYCFQATHDPLTFGSGTKLEIKR

SEQ ID NO: 273 - protein, 247 aa, Artificial Sequence
  Description of Artificial Sequence: Synthetic polypeptide
EVQLVESGGGLVQPGSSLKLSCVASGFTFSNYGMNWIRQAPKKGLEWIGMIYYDSSEKHYADSVKGRFTISRDNSKNTLYLEMNSLRSEDTAIYYCAKGTTPDYWGQGVMVTVSSASTKGPSVFPLAPQVQLKQSGPGLVQPSQSLSITCTVSGFSLTNYGVHWVRQSPGKGLEWLGVIWSGGNTDYNTPFTSRLSINKDNSKSQVFFKMNSLQSNDTAIYYCARALTYYDYEFAYWGQGTLVTVSA

SEQ ID NO: 274 - protein, 233 aa, Artificial Sequence
  Description of Artificial Sequence: Synthetic polypeptide
DVVLTQTPVSLSVTLGDQASMSCRSSQSLEYSDGYTFLEWFLQKPGQSPQLLIYEVSNRFSGVPDRFIGSGSGTDFTLKISRVEPEDLGVYYCFQATHDPLTFGSGTKLEIKRTVAAPSVFIFPPDILLTQSPVILSVSPGERVSFSCRASQSIGTNIHWYQQRTNGSPRLLIKYASESISGIPSRFSGSGSGTDFTLSINSVESEDIADYYCQQNNNWPTTFGAGTKLELKR

SEQ ID NO: 275 - protein, 247 aa, Artificial Sequence; identical to SEQ ID NO: 271
  Description of Artificial Sequence: Synthetic polypeptide

SEQ ID NO: 276 - protein, 226 aa, Artificial Sequence; identical to SEQ ID NO: 268
  Description of Artificial Sequence: Synthetic polypeptide

SEQ ID NO: 277 - protein, 247 aa, Artificial Sequence; identical to SEQ ID NO: 273
  Description of Artificial Sequence: Synthetic polypeptide

SEQ ID NO: 278 - protein, 226 aa, Artificial Sequence; identical to SEQ ID NO: 270
  Description of Artificial Sequence: Synthetic polypeptide

SEQ ID NO: 279 - protein, 240 aa, Artificial Sequence; identical to SEQ ID NO: 267
  Description of Artificial Sequence: Synthetic polypeptide

SEQ ID NO: 280 - protein, 233 aa, Artificial Sequence; identical to SEQ ID NO: 272
  Description of Artificial Sequence: Synthetic polypeptide

SEQ ID NO: 281 - protein, 240 aa, Artificial Sequence; identical to SEQ ID NO: 269
  Description of Artificial Sequence: Synthetic polypeptide

SEQ ID NO: 282 - protein, 233 aa, Artificial Sequence; identical to SEQ ID NO: 274
  Description of Artificial Sequence: Synthetic polypeptide

SEQ ID NO: 283 - protein, 246 aa, Artificial Sequence
  Description of Artificial Sequence: Synthetic polypeptide
QVQLKQSGPGLVQPSQSLSITCTVSGFSLTNYGVHWVRQSPGKGLEWLGVIWSGGNTDYNTPFTSRLSINKDNSKSQVFFKMNSLQSNDTAIYYCARALTYYDYEFAYWGQGTLVTVSAASTKGPEVQLLESGGDLVRPGGSLRLSCAASGFSFSRYGMSWVRQAPGKGLDWVAHISASAGATYYADSVKGRFTISRDNSKNTLFLQMNNLRADDTAIYYCAKGGKQWLIPWFDPWGQGTLVTVSS

SEQ ID NO: 284 - protein, 221 aa, Artificial Sequence
  Description of Artificial Sequence: Synthetic polypeptide
DILLTQSPVILSVSPGERVSFSCRASQSIGTNIHWYQQRTNGSPRLLIKYASESISGIPSRFSGSGSGTDFTLSINSVESEDIADYYCQQNNNWPTTFGAGTKLELKRTVAAPDIQMTQSPSSVSASVGDRVTIACRASQDISDRLAWYQQKPGKVPKVLIYGASSLQSGVPSRFSGSGSGTDFTLTINSLQPEDFATYYCQQANSFPLTFGGGTKVEMKR

SEQ ID NO: 285 - protein, 246 aa, Artificial Sequence
  Description of Artificial Sequence: Synthetic polypeptide
EVQLLESGGDLVRPGGSLRLSCAASGFSFSRYGMSWVRQAPGKGLDWVAHISASAGATYYADSVKGRFTISRDNSKNTLFLQMNNLRADDTAIYYCAKGGKQWLIPWFDPWGQGTLVTVSSASTKGPQVQLKQSGPGLVQPSQSLSITCTVSGFSLTNYGVHWVRQSPGKGLEWLGVIWSGGNTDYNTPFTSRLSINKDNSKSQVFFKMNSLQSNDTAIYYCARALTYYDYEFAYWGQGTLVTVSA

SEQ ID NO: 286 - protein, 221 aa, Artificial Sequence
  Description of Artificial Sequence: Synthetic polypeptide
DIQMTQSPSSVSASVGDRVTIACRASQDISDRLAWYQQKPGKVPKVLIYGASSLQSGVPSRFSGSGSGTDFTLTINSLQPEDFATYYCQQANSFPLTFGGGTKVEMKRTVAAPDILLTQSPVILSVSPGERVSFSCRASQSIGTNIHWYQQRTNGSPRLLIKYASESISGIPSRFSGSGSGTDFTLSINSVESEDIADYYCQQNNNWPTTFGAGTKLELKR

SEQ ID NO: 287 - protein, 253 aa, Artificial Sequence
  Description of Artificial Sequence: Synthetic polypeptide
QVQLKQSGPGLVQPSQSLSITCTVSGFSLTNYGVHWVRQSPGKGLEWLGVIWSGGNTDYNTPFTSRLSINKDNSKSQVFFKMNSLQSNDTAIYYCARALTYYDYEFAYWGQGTLVTVSAASTKGPSVFPLAPEVQLLESGGDLVRPGGSLRLSCAASGFSFSRYGMSWVRQAPGKGLDWVAHISASAGATYYADSVKGRFTISRDNSKNTLFLQMNNLRADDTAIYYCAKGGKQWLIPWFDPWGQGTLVTVSS

SEQ ID NO: 288 - protein, 228 aa, Artificial Sequence
  Description of Artificial Sequence: Synthetic polypeptide
DILLTQSPVILSVSPGERVSFSCRASQSIGTNIHWYQQRTNGSPRLLIKYASESISGIPSRFSGSGSGTDFTLSINSVESEDIADYYCQQNNNWPTTFGAGTKLELKRTVAAPSVFIFPPDIQMTQSPSSVSASVGDRVTIACRASQDISDRLAWYQQKPGKVPKVLIYGASSLQSGVPSRFSGSGSGTDFTLTINSLQPEDFATYYCQQANSFPLTFGGGTKVEMKR

SEQ ID NO: 289 - protein, 253 aa, Artificial Sequence
  Description of Artificial Sequence: Synthetic polypeptide
EVQLLESGGDLVRPGGSLRLSCAASGFSFSRYGMSWVRQAPGKGLDWVAHISASAGATYYADSVKGRFTISRDNSKNTLFLQMNNLRADDTAIYYCAKGGKQWLIPWFDPWGQGTLVTVSSASTKGPSVFPLAPQVQLKQSGPGLVQPSQSLSITCTVSGFSLTNYGVHWVRQSPGKGLEWLGVIWSGGNTDYNTPFTSRLSINKDNSKSQVFFKMNSLQSNDTAIYYCARALTYYDYEFAYWGQGTLVTVSA

SEQ ID NO: 290 - protein, 228 aa, Artificial Sequence
  Description of Artificial Sequence: Synthetic polypeptide
DIQMTQSPSSVSASVGDRVTIACRASQDISDRLAWYQQKPGKVPKVLIYGASSLQSGVPSRFSGSGSGTDFTLTINSLQPEDFATYYCQQANSFPLTFGGGTKVEMKRTVAAPSVFIFPPDILLTQSPVILSVSPGERVSFSCRASQSIGTNIHWYQQRTNGSPRLLIKYASESISGIPSRFSGSGSGTDFTLSINSVESEDIADYYCQQNNNWPTTFGAGTKLELKR

SEQ ID NO: 291 - protein, 253 aa, Artificial Sequence; identical to SEQ ID NO: 287
  Description of Artificial Sequence: Synthetic polypeptide

SEQ ID NO: 292 - protein, 221 aa, Artificial Sequence; identical to SEQ ID NO: 284
  Description of Artificial Sequence: Synthetic polypeptide

SEQ ID NO: 293 - protein, 253 aa, Artificial Sequence; identical to SEQ ID NO: 289
  Description of Artificial Sequence: Synthetic polypeptide

SEQ ID NO: 294 - protein, 221 aa, Artificial Sequence; identical to SEQ ID NO: 286
  Description of Artificial Sequence: Synthetic polypeptide

SEQ ID NO: 295 - protein, 246 aa, Artificial Sequence; identical to SEQ ID NO: 283
  Description of Artificial Sequence: Synthetic polypeptide

SEQ ID NO: 296 - protein, 228 aa, Artificial Sequence; identical to SEQ ID NO: 288
  Description of Artificial Sequence: Synthetic polypeptide

SEQ ID NO: 297 - protein, 246 aa, Artificial Sequence; identical to SEQ ID NO: 285
  Description of Artificial Sequence: Synthetic polypeptide

SEQ ID NO: 298 - protein, 228 aa, Artificial Sequence; identical to SEQ ID NO: 290
  Description of Artificial Sequence: Synthetic polypeptide

SEQ ID NO: 299 - protein, 250 aa, Artificial Sequence
  Description of Artificial Sequence: Synthetic polypeptide
EVQLVESGGGLVQPGGSLRLSCAASGYTFTNYGMNWVRQAPGKGLEWVGWINTYTGEPTYAADFKRRFTFSLDTSKSTAYLQMNSLRAEDTAVYYCAKYPHYYGSSHWYFDVWGQGTLVTVSSASTKGPEVQLLESGGDLVRPGGSLRLSCAASGFSFSRYGMSWVRQAPGKGLDWVAHISASAGATYYADSVKGRFTISRDNSKNTLFLQMNNLRADDTAIYYCAKGGKQWLIPWFDPWGQGTLVTVSS

SEQ ID NO: 300 - protein, 221 aa, Artificial Sequence
  Description of Artificial Sequence: Synthetic polypeptide
DIQMTQSPSSLSASVGDRVTITCSASQDISNYLNWYQQKPGKAPKVLIYFTSSLHSGVPSRFSGSGSGTDFTLTISSLQPEDFATYYCQQYSTVPWTFGQGTKVEIKRTVAAPDIQMTQSPSSVSASVGDRVTIACRASQDISDRLAWYQQKPGKVPKVLIYGASSLQSGVPSRFSGSGSGTDFTLTINSLQPEDFATYYCQQANSFPLTFGGGTKVEMKR

SEQ ID NO: 301 - protein, 250 aa, Artificial Sequence
  Description of Artificial Sequence: Synthetic polypeptide
EVQLLESGGDLVRPGGSLRLSCAASGFSFSRYGMSWVRQAPGKGLDWVAHISASAGATYYADSVKGRFTISRDNSKNTLFLQMNNLRADDTAIYYCAKGGKQWLIPWFDPWGQGTLVTVSSASTKGPEVQLVESGGGLVQPGGSLRLSCAASGYTFTNYGMNWVRQAPGKGLEWVGWINTYTGEPTYAADFKRRFTFSLDTSKSTAYLQMNSLRAEDTAVYYCAKYPHYYGSSHWYFDVWGQGTLVTVSS

SEQ ID NO: 302 - protein, 221 aa, Artificial Sequence
  Description of Artificial Sequence: Synthetic polypeptide
DIQMTQSPSSVSASVGDRVTIACRASQDISDRLAWYQQKPGKVPKVLIYGASSLQSGVPSRFSGSGSGTDFTLTINSLQPEDFATYYCQQANSFPLTFGGGTKVEMKRTVAAPDIQMTQSPSSLSASVGDRVTITCSASQDISNYLNWYQQKPGKAPKVLIYFTSSLHSGVPSRFSGSGSGTDFTLTISSLQPEDFATYYCQQYSTVPWTFGQGTKVEIKR

SEQ ID NO: 303 - protein, 257 aa, Artificial Sequence
  Description of Artificial Sequence: Synthetic polypeptide
EVQLVESGGGLVQPGGSLRLSCAASGYTFTNYGMNWVRQAPGKGLEWVGWINTYTGEPTYAADFKRRFTFSLDTSKSTAYLQMNSLRAEDTAVYYCAKYPHYYGSSHWYFDVWGQGTLVTVSSASTKGPSVFPLAPEVQLLESGGDLVRPGGSLRLSCAASGFSFSRYGMSWVRQAPGKGLDWVAHISASAGATYYADSVKGRFTISRDNSKNTLFLQMNNLRADDTAIYYCAKGGKQWLIPWFDPWGQGTLVTVSS

SEQ ID NO: 304 - protein, 228 aa, Artificial Sequence
  Description of Artificial Sequence: Synthetic polypeptide
DIQMTQSPSSLSASVGDRVTITCSASQDISNYLNWYQQKPGKAPKVLIYFTSSLHSGVPSRFSGSGSGTDFTLTISSLQPEDFATYYCQQYSTVPWTFGQGTKVEIKRTVAAPSVFIFPPDIQMTQSPSSVSASVGDRVTIACRASQDISDRLAWYQQKPGKVPKVLIYGASSLQSGVPSRFSGSGSGTDFTLTINSLQPEDFATYYCQQANSFPLTFGGGTKVEMKR

SEQ ID NO: 305 - protein, 257 aa, Artificial Sequence
  Description of Artificial Sequence: Synthetic polypeptide
EVQLLESGGDLVRPGGSLRLSCAASGFSFSRYGMSWVRQAPGKGLDWVAHISASAGATYYADSVKGRFTISRDNSKNTLFLQMNNLRADDTAIYYCAKGGKQWLIPWFDPWGQGTLVTVSSASTKGPSVFPLAPEVQLVESGGGLVQPGGSLRLSCAASGYTFTNYGMNWVRQAPGKGLEWVGWINTYTGEPTYAADFKRRFTFSLDTSKSTAYLQMNSLRAEDTAVYYCAKYPHYYGSSHWYFDVWGQGTLVTVSS

SEQ ID NO: 306 - protein, 228 aa, Artificial Sequence
  Description of Artificial Sequence: Synthetic polypeptide
DIQMTQSPSSVSASVGDRVTIACRASQDISDRLAWYQQKPGKVPKVLIYGASSLQSGVPSRFSGSGSGTDFTLTINSLQPEDFATYYCQQANSFPLTFGGGTKVEMKRTVAAPSVFIFPPDIQMTQSPSSLSASVGDRVTITCSASQDISNYLNWYQQKPGKAPKVLIYFTSSLHSGVPSRFSGSGSGTDFTLTISSLQPEDFATYYCQQYSTVPWTFGQGTKVEIKR

SEQ ID NO: 307 - protein, 257 aa, Artificial Sequence; identical to SEQ ID NO: 303
  Description of Artificial Sequence: Synthetic polypeptide

SEQ ID NO: 308 - protein, 221 aa, Artificial Sequence; identical to SEQ ID NO: 300
  Description of Artificial Sequence: Synthetic polypeptide

SEQ ID NO: 309 - protein, 257 aa, Artificial Sequence; identical to SEQ ID NO: 305
  Description of Artificial Sequence: Synthetic polypeptide

SEQ ID NO: 310 - protein, 221 aa, Artificial Sequence; identical to SEQ ID NO: 302
  Description of Artificial Sequence: Synthetic polypeptide

SEQ ID NO: 311 - protein, 250 aa, Artificial Sequence; identical to SEQ ID NO: 299
  Description of Artificial Sequence: Synthetic polypeptide

SEQ ID NO: 312 - protein, 228 aa, Artificial Sequence; identical to SEQ ID NO: 304
  Description of Artificial Sequence: Synthetic polypeptide

SEQ ID NO: 313 - protein, 250 aa, Artificial Sequence; identical to SEQ ID NO: 301
  Description of Artificial Sequence: Synthetic polypeptide

SEQ ID NO: 314 - protein, 228 aa, Artificial Sequence; identical to SEQ ID NO: 306
  Description of Artificial Sequence: Synthetic polypeptide

SEQ ID NO: 315 - protein, 248 aa, Artificial Sequence
  Description of Artificial Sequence: Synthetic polypeptide
EVQLLESGGDLVRPGGSLRLSCAASGFSFSRYGMSWVRQAPGKGLDWVAHISASAGATYYADSVKGRFTISRDNSKNTLFLQMNNLRADDTAIYYCAKGGKQWLIPWFDPWGQGTLVTVSSASTKGPEVQLLESGGDLVRPGGSLRLSCAASGFSFSRYGMSWVRQAPGKGLDWVAHISASAGATYYADSVKGRFTISRDNSKNTLFLQMNNLRADDTAIYYCAKGGKQWLIPWFDPWGQGTLVTVSS

SEQ ID NO: 316 - protein, 221 aa, Artificial Sequence
  Description of Artificial Sequence: Synthetic polypeptide
DIQMTQSPSSVSASVGDRVTIACRASQDISDRLAWYQQKPGKVPKVLIYGASSLQSGVPSRFSGSGSGTDFTLTINSLQPEDFATYYCQQANSFPLTFGGGTKVEMKRTVAAPDIQMTQSPSSVSASVGDRVTIACRASQDISDRLAWYQQKPGKVPKVLIYGASSLQSGVPSRFSGSGSGTDFTLTINSLQPEDFATYYCQQANSFPLTFGGGTKVEMKR

SEQ ID NO: 317 - protein, 255 aa, Artificial Sequence
  Description of Artificial Sequence: Synthetic polypeptide
EVQLLESGGDLVRPGGSLRLSCAASGFSFSRYGMSWVRQAPGKGLDWVAHISASAGATYYADSVKGRFTISRDNSKNTLFLQMNNLRADDTAIYYCAKGGKQWLIPWFDPWGQGTLVTVSSASTKGPSVFPLAPEVQLLESGGDLVRPGGSLRLSCAASGFSFSRYGMSWVRQAPGKGLDWVAHISASAGATYYADSVKGRFTISRDNSKNTLFLQMNNLRADDTAIYYCAKGGKQWLIPWFDPWGQGTLVTVSS

SEQ ID NO: 318 - protein, 228 aa, Artificial Sequence
  Description of Artificial Sequence: Synthetic polypeptide
DIQMTQSPSSVSASVGDRVTIACRASQDISDRLAWYQQKPGKVPKVLIYGASSLQSGVPSRFSGSGSGTDFTLTINSLQPEDFATYYCQQANSFPLTFGGGTKVEMKRTVAAPSVFIFPPDIQMTQSPSSVSASVGDRVTIACRASQDISDRLAWYQQKPGKVPKVLIYGASSLQSGVPSRFSGSGSGTDFTLTINSLQPEDFATYYCQQANSFPLTFGGGTKVEMKR

SEQ ID NO: 319 - protein, 255 aa, Artificial Sequence; identical to SEQ ID NO: 317
  Description of Artificial Sequence: Synthetic polypeptide

SEQ ID NO: 320 - protein, 221 aa, Artificial Sequence; identical to SEQ ID NO: 316
  Description of Artificial Sequence: Synthetic polypeptide

SEQ ID NO: 321 - protein, 248 aa, Artificial Sequence; identical to SEQ ID NO: 315
  Description of Artificial Sequence: Synthetic polypeptide

SEQ ID NO: 322 - protein, 228 aa, Artificial Sequence; identical to SEQ ID NO: 318
  Description of Artificial Sequence: Synthetic polypeptide

SEQ ID NO: 323 - protein, 116 aa, Artificial Sequence
  Description of Artificial Sequence: Synthetic polypeptide
QVQLQESGPGLVKPSQTLSLTCTVSGYSITSDYAWNWIRQPPGKGLEWMGYISYSGNTRYNPSLKSRITISRDTSKNQFFLKLNSVTAADTATYYCATAGRGFPYWGQGTLVTVSS

SEQ ID NO: 324 - protein, 108 aa, Artificial Sequence
  Description of Artificial Sequence: Synthetic polypeptide
DIQMTQSPSSMSVSVGDRVTITCHSSQDINSNIGWLQQKPGKSFKGLIYHGTNLDDGVPSRFSGSGSGTDYTLTISSLQPEDFATYYCVQYGQFPWTFGGGTKLEIKR

SEQ ID NO: 325 - protein, 116 aa, Artificial Sequence
  Description of Artificial Sequence: Synthetic polypeptide
QVQLQESGPGLVKPSQTLSLTCTVSGYSITSDYAWNWIRQPPGKGLEWMGYISYSANTRYNPSLKSRITISRDTSKNQFFLKLNSVTAADTATYYCATAGRGFPYWGQGTLVTVSS

SEQ ID NO: 326 - protein, 108 aa, Artificial Sequence
  Description of Artificial Sequence: Synthetic polypeptide
DIQMTQSPSSMSVSVGDRVTITCHSSQDISSNIGWLQQKPGKSFKGLIYHGTNLEDGVPSRFSGSGSGTDYTLTISSLQPEDFATYYCVQYGQFPWTFGGGTKLEIKR

SEQ ID NO: 327 - protein, 116 aa, Artificial Sequence
  Description of Artificial Sequence: Synthetic polypeptide
QVQLQESGPGLVKPSQTLSLTCTVSGYSITSDYAWNWIRQPPGKGLEWMGYISYSGNTRYNPSLRSRITISRDTSKNQFFLKLNSVTAADTATYYCATAGRGFPYWGQGTLVTVSS

SEQ ID NO: 328 - protein, 108 aa, Artificial Sequence; identical to SEQ ID NO: 324
  Description of Artificial Sequence: Synthetic polypeptide

SEQ ID NO: 329 - protein, 5 aa, Artificial Sequence
  Description of Artificial Sequence: Synthetic peptide
GGGGS

SEQ ID NO: 330 - protein, 121 aa, Artificial Sequence
  Description of Artificial Sequence: VH Tetanus Toxiod
EVQLLESGGDLVRPGGSLRLSCAASGFSFSRYGMSWVRQAPGKGLDWVAHISASAGATYYADSVKGRFTISRDNSKNTLFLQMNNLRADDTAIYYCAKGGKQWLIPWFDPWGQGTLVTVSS

SEQ ID NO: 331 - protein, 107 aa, Artificial Sequence
  Description of Artificial Sequence: VL Tetanus Toxiod
IQMTQSPSSVSASVGDRVTIACRASQDISDRLAWYQQKPGKVPKVLIYGASSLQSGVPSRFSGSGSGTDFTLTINSLQPEDFATYYCQQANSFPLTFGGGTKVEMKR
